United States Patent Application Publication US 2007/0237770 A1 - sequence listing, part 3

SEQ ID NO: 178 - DNA, 92969 bp, Mus musculus
  misc_feature (1)...(92969): n = A,T,C or G
cctccctccaaggcttgctggcatgtcttaggtgtgggggaaagcccagagctgggagaatataaattttgtgttcccctgcacctccccctcctgtcacctctcattcccctgagtctctgtggggtggaatggagagaggggactaaaagacctgggagccacatccacaacaggtaaagcaaggcgagagtcatcaggaactctcagatgagattgccttctggaaccttctggaatctgagatcataagaactggtttgagatgcgagcagctaggacctgttgtgaagggaggcaggcccgagtgtgagtttgggaaggtgagctgtgcactactggggtgtgtgagcgtgcatgtgtgtgactctctgtgtgagcacgtgtgtgtgtgtgtgtgtgtgtgtgtgtgtgtgtgtgtgtggcactccggtgactgggggtggggaggcagtgggtgaacgtgtgcgttttgttttagttggaggaaaggggcagagtggcttgatccagagcttggaactgagggtgggggaggggagagcacggcttcacatcctctggagaagatggaggtggaggacctttgctgccagaacccaccctggtctctgctgccccggcctgcttcggcgtgcgggtgtgggcacatgaccactcagtaagaaagagttcctgtcagggctggaaactgcggagccgctctggggcaggctggcagggcttacgggaggcccagacctggggagacaggagtctgggattgctggagctcagggagaggtggaaacacagccctgaggatgtttgcagggcatgaatggcctacttactcacctgggcaaagacggacattgcctttctgtgtgcagactggcctctcttccctgccagcctgcattctggcctgactcagggggcacgaggcgggcggaagataaggggtgagttttgacaaacgtcgagaaacctaatgcctggcagctctgggctttggccagttttactgaactcattcatattggtaagcttcagccctgagggctggctttccacctacaggccaggccctgtcctctgcccgctggagacctgtctgtcacttggtacttttccttcctcccaccacctcggtttcccaagcatctgacaggcctgtgtccggtgagcaggtagctaccctagaagtgcatgtgagtgcctctgtgtcccaccctgtggtggccacaaatgatcgctgtcacctccccctctgccccccagccccttccctcctcagatcaaggacttgctcaggagtttggagctggatccacaactggctttcagaagtgggtcaatgaccccctgaacagggcgcttgggaccttggtttgccaatggcttccccctgtaacaaaagccccagagagctgcaggctttgcgtttcagagctttgtgcccggggctgtctgcttgtggttaccgaagagcaaactgagcaaactgggctgctggctcagaggagatacaggataaggaaccaggcctaggggacccctgggtgaggtacagcgtcaggctatgtgggctctggggtggggagagggctgtggaagggtgggatgcccaaagggtagatcctgggggcgggggcaggtttacagagaggactggttttttttttttttttttttttacaagtttctaattatatttatttggagttttcctctggtggtttgaagctgttaacagcaggaacctgtatcccctgatgtttgtttttgtttctgaccagctgcttggccccagagtagtgaatccccaggctggctacaacacctgcccaccactgcaccctcccaccttctcctccttgcctgtgtatctgcccgcgccctgtctaccctggccctggttccctctatacgtcccgtcccggcatctgtactctggcttttaaccaccagccagattcagctgtagtctatcttgggctctgtgccggttggttgcttcaagcccaacaaagtactgagctgagggcatggggaggcgatctctctctctctctctctctctctctctctctctctctctctctctctctctctctctgtgtgggtttggatcccgcctttacactggctattggttctttcccaggataacttcagtaggtgctccccatccatttaataaaccatgcctgctgctccccaagagggtaacaaaggagcccgcgctcctcccatccaccatttgcagtctcttctagccctggattgattcatcagggcccaggacgctgtctttgtgctctcttgaatctgtgtatgtgcagacacactgccgcagcacacacgtggaggtcagaagacagcctccggagtcagctggcttgcaatctggggactctcctgtctctgcctcccgtttttgctgtaggagcactcagactgaatctagccttacatgagttctgggaattccagctgggggccttcacggtcacatgaggtgctttacccagtgagctttctgctcctcagaataaactccctaggacacccctgttcccagaatgccaaatggtcaaaggagagtaaagaggcaggcttcttctctggtgtatcccgcaggtagctgccatctgtttaacagatgccctcagagctccttcattacatggttactctgtcccactcacaagggagcccacagccctggcacagtgcttgcccttgtgcaggtccctagtggctgtttgctaagtgctcaagtgtgcacggctctgctggcagttattgtgggttcaaagatccagaagccatggcctcgaggaattcatggcaccgagcgaacatgaagcaagcatccaagaggatgctgaggaggatgagtgacagcagcaagctcccattgggcactccctgtgtccacacctgccccaggactggtgtagtggcactcaagtctagaacctcgtctcgtagtgtgtctgtcacgttgctgcctccagagtgtctcccagttcaggcaagtagcttatttacacaagttggaaaagagagatagacaggcttgccctggaggtcctgatttcctgggtttagacatccatgagtcttcacaggtccccagattccagtgcacagcctgagtggaggaccaccatcctaaaccaactcacgcctaaaagtgtcgcttggcttgcagctggtaaacagcttctaagaggatggatatgttgagggtgcccgtgtgtgccaccaaggtccctttgaggacttatttagggctggcaggtgtgctgagaaggatctttgaagacctggcagaggtggaaatgctgggtacgatttgatttagggccttgtctcgctgctctgtgcctcaggccagaaaacttcagccatgccgttggaagtacctttcttcagcagtcgccagccatgggagaggctacatgttacatgagacagcttcagaatgttagctaagtggctcagcaggaaccacaaaggggggcacgctcagtccccctcaggctgggagcttactggggacagggcagacaattctgagccagtcttggaaaacagaagtgggtggggttgcaatataaacgggaagaaggtgggatgcagtggactggttagctggtgctgagggagctggtaccaagggagtagctggtgccaggggagtagctggtgccaagggagtaggagcagggtgagacacctcccagagcttccaaagcataaaacattgggagcagggagatggctgaggctaggaagagcctggggcagccagcgggctgtggtcggcttcaccgctgctctggtcctgggggccacttgaggggagacaaagggaagagcctgatgcatcaggagccaaaccccagcacatggagacaggcgccactgagatggtggcgggagagggacttctggaggagtctctagaattctgggccagacccagaagcgttccttattcagagcccctagagctatctcttctgctccgtgaagtctgtgcccttgggacggttcctattgcacagcccaccatgaatatctggcctaaggccagtgggactgaagagctgtctttgagatgaaaagggtcacatgtggctcatggctaccaccgcagtggacagaagggacttggatcccacagtgctcagccctcagcctcaccctctcaagctcaggcagtccacacagattaacaagtgaatggcctcgtctggggaggcgccaccatgggatacatggtatgggggaaaatctaaggatggaaagtgagaaaggagccaggtgtggcggcagggcaagcacctgccatcccaacactagggaggctggagcagggggggtcatgagttcaaggtcagcctgtgctatatagtaaagctttcttaaaaagaaaacaaaacaaaaaacaaacaaacaaacaaaaccccaccttccccagagaaatggtcgtgctggatcgtaacctggggcagtctccacgggtgactttattgtgaccggacatttcttgcttctgattccattccatcagttggtcaaacattccccaacagcctcgtgccacccacaagatctctcttacttgacttaggaactcgactactgggcctctcttctctccattgtctctctttggtgactgcttggcaggcacatgactgccgagcttgtctgaggtgggcagtaagtgtagacagtctcctgtttctgcaaatggcagagacttccagtgtgcggcgcacgtctccgtttagttgccacgccttaaggagctgggttcacaggattgggcgatgaggcctgagaatctgcattgtaacaaaccccactttgctcacgggtatgcggctcaggcgtcagagcagcctcactccagggcctctgcccctttactggcagacttcaacccatacactctgtttttccagtttgtagggagacatgggctctccctactcagactgtgacagagggtctcaagcccagctgctcactggaatcggatgtgttgagtccagttctttggggccttgggcatgtttaggggagtcggctctgctgtgcagcctgagttgaggctcatccctaatgcttctgtcacttatcctggttggctcgttctgaatgcaatgactgccacatagggccttgtcctcacgtcacttttttatgggtgccgtgatgtgatccccagttgcttacgatcattttcttctttttttttttttctgaggcagatttcttagtatagtcctggatagtcctctgtagtccaggctggcctccaagtcagagatcctcctgcctctgcctcccaagtgatactccaccacacctagaccaccggaggtccttaaccacccccctacccttaccccaccccctgctctggaggagtcccttcctttagtgtcgctctgtctgtcacacttactagagggagcaatgagtgttagtccagaagtatccagaactcgagggcatagaggaggagaggggaaggggctctgcctggtcagatggctcagagagctgtgcctgccaggccaacacctgccagctcccggtccttccattgatagctcagggccaagagaagctctgctcctctaatgcttcttggtgccatggtgaacaaggctgcgtgaacagtcgggagctgacttcatctttttctgggtttttgagacggggtctgaactcctgatccttctgcctcggtctctgggtttatttgaattccggaagcgttcagaggaaggcaagggaagctcaggtgtgcacaggcatatggggacttcgcctttgggaaacacaccttcacagctcacttgacaccagttctgtacctatgtattcttgtgtgcaccgtaaccgagtgctgggatcacagctgtgcagtgctgtgctgggcaggactagtgtgttctacagtggaccaggaggcagatgaggatcccagacagcccccacctccctttcttccttaattactagagagcagctgggcagggtgtggcatgcctgtaatcccagcctttggaagatggaggcagggggagcaggcattgaggaccgccctcagctgtggaatgagttctaggccaacttggactatatgtgttctgatctagaaaaacactatcagtgatcactgtaccatcaccagtgactctgtgcctgtctctttcccttcaagttcactgctaagaaagataaactagtcctcactgggctctgtctgacacatcacgtgtgctactcaaactgaagagggtgtttcagagagtggtgccgctgtcaccatagtggtttgagtatttctgagacagtctgaattcctgaagtgttcagaggaagcaaggggacctcaggtgtgcaccctcgggtgtgcatgggcatacagagacactgcccctggggaacacaccttcaaaactcacccaagacatgccagttctgttcttacgtgtcctcctcggcccctggcagatgtagatgagtgtgtggaaggcacggacaattgccacatcgatgccatctgccagaataccccacggtcttacaagtgcatctgcaagtccggctacacgggggacgggaagcactgcaaaggtgagcctgggaggtctccactgcaaaggtgagcctgggagggtccccaggatgggaagcactgcaaaggtgagactgggagggtccccaggatgggaagcactgcaaaggtgagactgggagggtccctactgcaaggtgagcctgggaggtctccactgcaaaggtgagcctgggagggtccccactgcaaaggtgagactgggaggtcctcactgcaaaggtgagactgggagggtccccaggatgggaagcactgcaaaggtgagactgggagggtccccactgcaaggtgagcctgggaggtctccactgcaaaggtgagcctgggagggtccccactgcaaagatgagactgggaggtcctcacagcaaaggtgagactgggagggtccccaggatgggaagcactgcaaaggtgagactgggaggtccccaggaggagctcgcaggagcctcggggcctgcaccatggtttccaggggcccacaacctccacaggccgaggaggactgccgcatcttcccagagatcgcacagggttggggtggacaccaaagcatcacacagccaagctgtgctggtggggacacacttcatagccttcatagctctctggggctggcacacctcagttacaaaactaaggcccgaagatccctgagacaggagcctgtactggcgcctgtcatagcatgcgcaaaggaccagacctgtgaaccccagtgggagttcacccacaagcaagcacatcacttgctataaaaacactgcagagtggctgggaatagcattctcagggacaaagtacacgttactttctgttgacataatacactgagaactacagtagcctcctgggacccagggaatgggggtgttggttcaaggatgacagtccttcccagtaataccacaactaaagaacgttcgagaactttatatgaatgatgtaatcaaaagcatgaaattaaaaatggcatagctgtttgcctgtgaccgtcaacatcttccggtgtgttttttctctctgcacagacgtggatgagtgtgaacgggaggacaacgcaggctgtgtgcacgactgtgtcaacatccctggtaattaccggtgtacctgctacgacggatttcacctggcacatgacggacacaactgtctgggtgagcgagagagccagggctggtggcccgggactggttggggaaggagctgctctcagtgtgtcttggccaagcaggaagaaagtggtcaaaaagagttccaggcttttaaaagcaaggatggggtagggcactgctaatgtgtattgcgtgcgtgcgtgcgtgcgtgcgtgcgtgtgtgtgtgtgtgtgtgcaggcacgagcgcgcacggaatgggggtgggttgacattaggacccttcttctaaagtcttttttttttttaaagatttatttatttattatatgtaagtacactgtagctgtcttcagatacaccagaagagggagtcagatctcgttacggatggttgtgagccaccatgtggttgctgggatttgaactctggaccttcggaagagcagtcgggtgctctaacccactgagccatctcaccagcccctcttctaaagtcttaaagtgtgtgagctccttaggagcaggtgtgtagaaagcactgtgcagctgtagcacagggcaggtgctgaggcaggagcactgttgctaatgcagttggatgctctctgagccctggatgcctctgccccttgtctcccgcctcccttcctgtcttaagactcatcctctccagttcagagccttcttggtctggcccggggaatcacctgtccccagaactctatctggggtagaatcactgacctcagctttagccagtcatcttggagttactcggaccctgtcagagtttcctctacgtaggaactctgaagcttctaacaggatttgaaatttgagactggggtcctctctcaaacgtctgttcgatgagtcagcaaagggaagaacagcaatggaatggcaatggctggaacatggtagctcagatgctctgtgacctaggaacccccttactgcatagctgccatgtggtcatcttctacccaggtccctggcaggcccttctccggggctcccctcccccgcccttctgctactatgaaagagctgtctctcccctgtcaccaaaggactatttagggacaagatctgaagtactcggtacagggtaggggtgcccacatgaccgtgaataccatctttgattctttggtctccattgggtcctaaccccaactatcaccaaccaaccatagagacaagggaaagaacaggtactgggagggtctgagttacaaaggtctggtgaaggtgagtgttcacagcctcaaccatccctctaacctttgagaaaactccaagaacacgcatgggtctcagtttctccagggagaagtagagggtgggagggatgcagccaggatggagatggagtccagatgtccaagtgatgaatttggctgtagtggtggtgactccgggctccctattgttcccctctaccatccagggtgtggcctggccaccttccccacccttccacgccgcattgccaggctttgttttgttaaaccaaaaataggagaaaagctaggaaatctgtggcagtgagcccaggcctgggggaagggagcacggctcgagttgtggccagtccacagaaacggtccttgccccatgaggacctgtggctcagaggccattcccaccatcgttggcacctcagccatacggctatctgaggaaagagcctttccaggttctctgattcctggctgctcatcagagccagcctcgacatggccctagtgcgccatggccgctcagtgggactagtacccatccttgtcttcaccgaggttcctctcgctctggcccagggtttcggtgtatgggagtttgcatgcatgtgtgtctgtgcaccacatgcctgcggggccagacgatgataccgggttccttgggactggagtgtcaggcagttagcagccatgtgggccctgggaataggacgcaggtccgagggttcagacgcagcctttacagcgtgggagaggagtccgggcctcaccttggctggccaggtttggatgttgcctgccctacctgagctctggacaaaggtgcctcttcacactcagggaagttttagctgacaagggctaaggagtgcttgctaagggtgggcctgtggtgtgtgtgtgtgtgtgtgtgcgcgcgcacacgtgtgctcacaggcattcttcagtctgccctcagtctatgctgctgctacaacagtcccaccaagcccctgtcttcacagatgtggatgagtgtgcagagggcaacggtggctgccagcagagctgtgtcaacatgatgggcagctacgagtgccattgcagagatggcttcttcctcagtgacaaccagcacacctgtatccagcggccagaaggtcagcccacggccatctaggcccccaggcttctcttcccagctgcccctcagcactctctgtcccacactctagactcctagcgtgcttagacactgtattccagactaatctagggaatggaaccgggacctgcccagagtagaaacaaagctattttggggcattctctggtccggcggtacggtgctgcaaattcctgctcgccagcatttgtctgtaagctgttccttccctgggacagcctcacctgcgtgcgtccctttccacagcctggatccatggctcatttcctcactgggccatgatggtctgagagcagcagggaagtccaatttgcctttgtgtccctgtcacttagcgtgctgccctgcctgtgatggcagcttaataaatctttgtggtctagccaagtgtggtggcacacacctttaatcctagcctgggtggggggaggcagaggcaggcctatctgtgagttccaggacagcctgactacactgagaaaccctgtctcagtctgatggctgtttctcttcttcaggttcctagtctcagtgtaagctctctgaggaaagataccctgttttagtttctctgggtccctcctagatccggagagcctctgagtagcaggctcagctgattcttagagtgtccttagccacagctggttctgccccattgaggctcccagtgcagacagagcgccaacgtctccttctccctttttagaaggaatgaactgcatgaacaagaaccacggctgtgcccacatttgccgggagactcccaaggggggcattgcctgtgaatgccgccctggcttcgagctcaccaagaaccaacgggactgtaaatgtgagatttgtgagggcaggagaatgggggggacaggaaggtgtggggcctcagtagccagagggcagggatgagatgaaagaggcctgggggcggggcacagtgaggaaaaggggcagctttccccaccttgaagacctgcagcacaagggacaagcaggctgacatgtctcctctctgtgcagtgacctgcaactatggtaatggcggctgccagcacacctgcgatgacacggagcagggtcctcggtgcggctgccacgtcaagtttgtgctccacaccgacgggaagacatgcattggtgggtgaagccacttgtgacaggattggggtggggtctgggacggaaggggaagagagaccctgggggacagtgatgtctaggtactggatagttactgatgtgggaatgaagaccaatgagaggacaggtggaaggaccactctgagagactaaagggcacacttgactacctgccctccccaggagtcccaccctcctcttcctcccatgttgaaacattaccaggttcggaactgttagcaggggtgctgggcaaccaaggcttgaggaattctggggcggtcagctgagcggctgacccagtctctggttgactagtgtggtaggggaatgaccacagccagtgtccctgctgtgaactggtgccaggacacagtagttgcttccagagcagttagccttgggctgaaatgaatcagtagggtggctccagcccctctcttcctctttaccctggcaaacccccttcctacccctcacctgatgccccaggcccacctcacacccaagcatctggtggtactgactttccagtgtgcctgtggctgcccaccccccctcacttgctgcagccttcccgtcctctaagcctgagacccttcttgaattcctaggcctgacctgactctccaggttcctggatgagctaagtccttaaagtgaaggttgaattccttccgttgctatttcttgagcggtgagagggctgacaagatgtcttcttggagaagtggggagtgaaaggcagggctctggctgggcatgaggcagggctcgggccagtcagaggtacttgtgcttgggctgtggacagtggtgcttatggaggtgtgtgtcactgcagccacaggacggggatcagacaggctcacaagatacacatgctttcaaaggctgctggagccgaagctctcccaactctgctctctaactcttctgagaccccaagacaggctcagggcttcatgctgctttttctgactgctgttccagctcccttcttattctcctgacagggctagttcttctgctttgcaaacctcccaccaccccctggacacaccacaaagcctccccccccccattcttccagaaggaactgcatggggagaagatgcacgaggcaggacagaggcccctggggcaggagaccctgttcccttgttctcagacggctgctttgtaattaggcttgagctctctaaccccactgagacccactgagtcctctgggcagagcaagtgatgctcctccctccccatccttctccctttgcccccagggagtgagcctacttgccttggacttaatttttcttggcagggggaaatgtcactggggttgtggggacatgcagcttgagtggcgagacaggagtatagttaagggatttagaggtggcgagatgcgaaacttgacacccgtgccagttttgcctggcatgctgtgcgtgctatgcgggggttggacccgcagctgctctctccgagacccagcatctctgctttatggtcccttgatgggggcttgatttctttgagggtaccaggcaggacaaggctgaggagcaaggctaatttgggatccctggaatcaccacatggggctagtggtttggaccgtcagggtggagggtgcggggtgggccttgccccaatctaaacggcttttttacaatgtcaaacaggggaaaggcggccagagcagctcgggcccactcaggccgtttctaatggtaaatatgcctgccctccctgtgcttgctagggaagggctaacccgctggggctcccactaaccttgcatgccctccagggctcccctggcagtgcgggctctggacccatctggtggcctaggaagcttcctgctggtcatcttcctggtccctggctctccttcttatgcctcctccacctctcattgccctggtcggtccctcccagccatgtgcacccctcggtccctgcagccagtgccatcttgcccactgttcgcactgtggctgagggaagtatctcagagctgaatgtcatcttctctgtgggccacccttcttgggttccttcctttctttagcacaccacacagcctcagctggtgatttctgcctgactctgggtccctcaccagccgtcttctctgagccctcagcccactcctctggaggaggggagtgacagtcttccttctcttgggtgtgataattatcatgtggtccacgcctggcacaaaggacaggtcgagctgtgccctcctccctgtgctcagccattgtcccgcagagctgagcatctctgcccagcttcttggtccagcctggggtgtatgccatgccagttctgttagcacccatcctggctgcttcagaggatctacacacagacagcatcttgtcccccactgtgcttctccaggccttgggagccctcggtccatacttagagcacttttgggggagtctggacttgagctcctcgcggtctgggggacctcggggagaccacagtgagaccagggcaggccaaggactcccaggcagaggtgggcttcttttggagccctggcacactgcccactttggggacaagggtgggcctaacatcctcattcttagaacaactcttctctcttgtcccatggaggccttaggatgccagtgggagaagacttggtgcctgggacagaccacagcacccaggtccccatgccaggctcttgctgtcctggggctgatggctttccccagaactctctctccaaagcaactgtttaacatctggtctcctcctgctctggcctctctgccacagactgagctgacaggagagacctagctgaaagctctgagctttctcttctgtgtcttccaccatctctcattctttctctggattcttctgcgctctccccccccccaccccgccgcgccccccccttcacaaaatatctcatcagcaaaagcaaagaaccagagagccaccgtgtttccaggtagacaggagggtttggggaggagtgaaaggagggtgacccagggctgcagtgtcagaagggtgggaggggttgagggggggtggagggtaggggataatagggggtcttgggggtgaattgatggggagcccttagatcttgagacactctttcctcgaggccttttaggagactgtccatcacaaacacccacactcatcctcaagataggaggatgaaactggtctaccccttcttttccctcaggccttaggatgctaatgctccgatgctcggtgcctaggacgagccctctttagctttcctctcctgctcccctgcccccacccccagcacattcctgcctgacagctctggcttgtacctgcctcactgctgcccaccttgtttcaatcaagtagggggcagggatgctgagcgagcggagcgcgagagagagagcgcttcctgcacttgtgaggggtgggaggaaggagaggctggagcatcgcttaacgctcctgctgacccccccccctccaccctgtgaggtggctgagggcttccctcaggccccatacctgagtctgacattcttctaggctagtaaccctattaccacctacacttccctcaacagaaacctgtgctgtcaacaacggaggctgcgacagtaagtgccatgatgcagcgaccggagtccactgcagctgtcctgtgggtttcatgctgcagccagacagaaagacctgcaaaggtgagatctcagagtgaatggggacacggagacctctgccaaagggaggggagagagttcctaggtgaccgaccacgcctcttcaacgccctttaaggctgtcagtttctcccacctcagttcagtgggcacagaagtccagctaccactttgctgccccctggcctggtctcccttgttccctctctcacccctgtccctgtattagggagaagggtctcaaccctggagggacagttgagcctgactctgtgttgttgtgcctgagccatgtgggtggtttaacttcccagcgggtctggaatgatctctggaagcataggtaggagtgcccacaccagggcctggttcggtccgccatgctgtggtgcccaggcttcctccactgaacctggctcatagatgtgcgcagagatggatgagcggtgatcagtgagaagaattggccctgtggggaccttttggcttggctctcattatgacttccattcctatactacccaccccatctcccctcctgccattacctgggatttgggggagatgagaaggaaaagggggaggggagccattctgcaaacgctgactcagcaggtccgtccgtgtcctctggtagggaggagtggggactgggtagtgccgggctccttctttgtgtctcttggcccaagagctgcaggaaggggagggcgggggcagccggtcagccagccgcagtagagaggtttcctgctgggaagggctgttgacaggtaggccaagagtgaaggccctgccccctccccctccacaagtgctgagtagcctgggtcctgtctgccaccagctcgggggaacttgacctcaggaaggaagctgcccacctgctcctttcttagtacccaaagctgccaggctctgagcctctgcagaccatgccagtcccgtccccctcctggcccctcatctctagcagcttctccctctatcttagaagtcctctctacccagcctctttggccagcccctcctctatgaaggctgcccttttacagcatgaccagaggcccccagcctttgtgacaggaaaggacagccctccctacagtcttggggatggctgtcaactggagagtaagggacatggaccagcctggatctcacatggccacctgctcccataagtctagaccgttgctccctgctggcataggtggttcctggacttggcttcaggagagatggtgttagtaatggccagatatcctaaacagggaagacatggagacagaaggtgacagccaagttaaaagggccaagccagggccctccttgattttccttgtctctgtgaggaagagatctgggctcctttgcccctagccttcaatgctgtccttcgtccccagatatagacgagtgccgcttaaacaacgggggctgtgaccacatctgccgcaacacagtgggcagcttcgagtgcagctgcaagaagggctacaagcttctcatcaacgaaaggagctgccagggtgagccggctccggccaagggggcgagtgtcagggatgctgtattccaagcgtctctgtaggcagggctatgccgcagacagacaacggtagtccttccttcttgcaggccagctccatgctgaaatacacagcttggcaaggggtgagcaagctttcaccacaatccaggttttcccaagtgtggcctgctgcaactaggttccacatgcacaggttccagaccctggcaattctggtggtgcacttttaatccctgcacttggaaggcagagacaggcagatctctgggtctgaggccagcctggtgcgttccaggatggccagggctatacagagagaccctgtctcagaaaaacaacaaaagccccaaaccccagacaaagggtacagagggagttgtgcgtgctcagatctggagttaggccaaggtctttcagcatcagagcccatcacctgagcatggaccaggtgccccgagacagactcagtggttcgaatccttgctgttccagatatagatgagtgctccttcgaccgaacctgtgaccacatgtgtgtcaacaccccggggagcttccagtgtctctgtcatcgtggctaccttctatatggtgtcactcactgcgggggtaagccagcaagatcacacctacacctgcctgcttcccagacaccccagccctcgactcttcacactccaaatggctgtgcttgtaatgagaaatccttggatggttcttgtctacatccaacaagataaaatagaaggcaccttccaaagaccagctgggagacaggataccagagagcagcatcctggcagcaagatgcttgagggtttcacgtagcccaggatagctgcacacacacacacacacacacacacacacacacacacacacacacagccagtggtgacctcgaactccaaacctccagccttcacttctcgagggttgcgatggcaggtggcacagactctgcctcctaattctaccttgcattccccatcgctgttcccagagacccaccctctcagtctctagcccaatgagacagtaagagaggaaagttctgaaaccttggtctggttggattggcccctgctcaatggcaactatgactggggatgtagagaagggagagaactttgagctcctcacaggccagagaaccttttactttgtttatgagaatgttaacgtgagacctaccttcctgacaagatttgtaaatgcacagtaatctctataagggtactggcaatctgatctctgactcctcccacagatgtggacgaatgtagcatcaataagggaggctgccgctttggctgcatcaacaccccaggcagctatcagtgtacctgcccagcaggccagggccgccttcactggaacgggaaggattgcacaggtgtgtggcgccctctgctggccagacataacaatgctgtttcaggggaaggtgtgagggggagcctgctgggtttaaaatgtgcaggtctccttgggcatgtaactagtccccctttccgcattaactctctgagggcaggaagacaaggcatgttcatattctcagaccttgcttcccttcctagagccagtgaagtgtcagagcagtcttggagcctcaaaagccatgcttagctgcaatcgctcgggcaagaaggatacttgtgccctgacctgtccctcccgggcccggttcttgccaggtatgtgagagagacggggttctggggagaagggagggcagactggctgttcagcagtgcctctgttcccccggggttcctccaaccattgggggttgagaggtgggtcagagctgtgataagccccttctttcagagtcagagaacggtttcaccgtgagctgtggtaccccgagccctaaagctgctccagcccgagtgatccactctgggaacagcaccgtctccagctcctgccatggtgagcacctgcccagagtcctcctcttctctgcccccacagttctcctcatccctggccgactcaccctctacctcccttgttactctctaactctccagctttgctgccaagctcctcctatcttacccctcctatctgttacccttggctttcctgatcccactctctagctaaaccttactgctgagctcggagccacctcccagagcaggccgtccccagggtccccaggccctggagctgtgctgagcttctcttctccctctagaggctgcagtgctgccagtcaagcagagagcctccttcaagatcaaggatgccaaatgtcgcctgcatctgcgaaacaaaggcaaagccgaggaggccagcaggatcctggggccaggtttggacctccctccctggccccaccaggctctccccacctctcagcccctctgcctagttctgtcatggattcacctgcaccctgggctgtggatagaatggggaagctgttgtaggctaaggccctggaagtccccgtcattccctcctaccgagaagagggttgggggtagggatgtctggggcggatggagaaataggagagtcagaagagagaacttgtcttcagtggaagctacagttcgaggttgacacggcctctgtttccaggtagtgtcccctgctctgactgcctggtcactttcatccaccttaagtgtgactcttctcggaagggcaagggcaggcgggcccggacccccccaggcaaggaggttacccggctcaccctggaattggaagctgaggtcagagcagaagaaacgacaggtgggcctagggacattgttgggtggagggccaaagaggagggcacatagcctggatccaaaagggacaagccaagggaagggggcacctcaactctgggcctgtgtaatggcgagcagcaaactccagggctgcccctgtcggctgccttctgctctgacctctctctcctcattctctgactcgcacaaccatccattaccagctggctgtgggctgccttgcctccgacagcggatggaacggaggctgaaagggtccctgaagatgctcagaaagtccatcaaccaagaccggttcctgctgcgtctggcaggccttgactatgagctagcccacaagccaggcctgggagctggggaccgagcagagctggtggaggtctgccgacctgggcagcaccgagcaggcaccaagtgtggtaagggagcttgccgggaagcaaaggtgtggggagtgggggaggcccaacttggccctggctcagagcagaacaggaccccttgtctcaggtgaagctctcaaaacgtgaggtggcgaagcccctcctgcccacgggcctcctttctctggtcccaggctgaacctcggacactaggcagggccggcagttctcctgcactcagatttgacatccctatctctccaagcagggttctgttcgttccctaatagatctcccatggctggaggagcgggaaggggagtcttaggcctgggtggtgggagatgggggggtggctagcgcggccgactctccctcagtcagctgcccgcagggaacgtattaccacggccagacggagcagtgtgtgccatgcccagcgggcaccttccaggagagggaagggcagctctcctgcgacctttgccctgggagtgatgcccatgggcctcttggagccaccaacgtcaccacgtgtgcaggtgccaggggaacaaacaacgcagagtgggctagggtgggcactgggatgcccgtgggcatggggtttcccaaagggcaggcccaggctccaggccagtctcctagttgatgtcctgtttgtatgcctccgctgttccctaagactgggtgacccagggagtggctcaggaccaaccccatcagagttgggcccttgcttcattgcaggtcagtgcccacctggccaccattcaggagatgggtttaagccctgccagccatgcccccggggcacctatcagcctgaagcagggcgaaccctgtgcttcccctgtggcggaggcctcaccaccaagcatgagggggcagtctccttccaggactgcgacaccaaaggtgagcaggttatttactccccggagcttcctatcctcagctgccacccaccccacacatctccaagcccctccacagacctgagtgttatctgaccatcttccctcaaaagtgaagacccaggtacctaactgtacatgttcttgtttcagagctgccccttgggccagacctggggatagaaagtgactaaacccttcctccctgtccagagtacattgcagattggtagccatttccctccatccccctaagtgagctcctgtatcagtctgacactgctcagggagggcctgcaggaagaggagggtgctgtagccagccactttggaaggtctctcttccctggctttagactatgtctgggaaaggtagggaccctggaagaaacctgggagtctctgatgtctggattctccatgacagatgtgcctgtctatccacggtccagatgcccactttcctaccatcttagcttctgccctcttctctcgcctgcagtccagtgctccccgggccactactataacactagcatccatcgctgtatccgctgtgctgtgggctcctaccagccagatttccgtcagaacttctgcacccgctgcccaggaaatacaagcactgactttgatggctcgaccagtgtggcccagtgcaagagtacgtggctggccaggctgtagggagtggaaagagatcttggagccatgtgcacgggaaaagggggtgggaggtggtaaggcagcggggaagggggccggagtgggtgggtgggcagctgtcagggatgcctgtagcatccttttggatactggaagggcaggaggagggtggacccagcaccccggaagagcaggtggtgatctagcatggttcaccacctatgtttgttctcccccttcaagcccctcagcctgcccaccacggttccccactgactgtccatctctcccttgctctctccaccggggtgtggctgcagatcggcagtgtggcggggagctaggtgagttcactggctacatcgagtctcccaactacccgggcaactacccggccggtgtggagtgcgtctggaacatcaaccccccacccaagcgcaagatcctcatcgtggtccccgagatcttcctgccctccgaggatgagtgtggggacgtcctggtcatgagaaagaactgtgggtgcctgcagagccggctggggggtgggcacgtggaatctggttggggaagagaaagacctgggacggtggagtggggaaccagcagatacacgagaggagccttgggggacagaagctagcacaggacctgtgggacaggttgggtgggcagcagtgagggagccagtcctgaggctgggatgccagtgctgccacctgactaattctaaccctagcctttctgccatcctcgtcccataaaggtcgattttaatgcacctgattgtgcagtagtcggccttgtagaataaacctggggctggcagaagagagggtgtgtggctagctgtgtgtttatgggggctggaggggggagcctctgtcagaatgacctcacagccccactaatctcctgacctgacgcttgccttgccagcctccccatcctctatcaccacttacgagacctgccagacctacgagcggcccattgccttcaccgcccggtccaggaaactctggatcaacttcaagaccagtgaggccaacagcgctcgaggcttccagattccctatgtgacctacgatggtgagcaagggcaggaaagatggggcggtgggtgggtcttgtaagcgtaccaggagagcagagttcccacgctcagcccccaaccctgttgactttacagaggactatgagcagctggtggaagacatagtgcgtgatggccggctgtatgcctcagaaaaccaccaggagatcctaaaggcaagtgagcgttcgctgtggtgcggatggaaatgggtatgcaccgatgtgcaagcaaactgctaagtacagcctgcctttctactcctggctctgtggggcatgcgctttcttcactgccgctttccagatgagagaggtaaagggctttcccatgataggcctgggctctggacccagctcacaaaaccagtgtcagcatactgcgtcacccctgggaggacaggagacatcctctgccttgtccatcacagaggcagagagggtaaactgcacaacgatatacgttgtttacttttttgagacagagtcttaagagtctaggttggctttgaactccgggttcccctgcttcccgctcctaagtgtttggtgggatcacaggcccagaggaacgaacaccaccctgggtctgtggatcccgatttgagtcccgcctggcgtagtgctgctcccctttgatcccagcactcaggaggcataggcgggtggatctccgagtttaaggccagtctggtctatatgtgcagtgctagggtagccaaggagacatactgagacccttccaaatattttttttttaacttcactcttttagttatggctatttgtgtggatatgtgcatgggattgcaaggcggccagaggtgtcagatcctcctggggatggggtagcaggcagttgtgagccatctaatatgggtgctggaacctaaacgcacatcctttgcaagaactatgtgtgctcttaacctctgagccatctctccagccccacgccactgtttgaaatcaaatgtaactgggtgtgctggtgcacatatggcccggctattcaggagctgaagtggaaagatcattcaagcccaagagttaagaaaacagcctgggtgacatgctggactccatcagacagcgaatcaaatgcaccgtgcaactgtatgcacaaagtagtgcagccatgctggagctggggtggcgcacctttgactgcagtacgtgggaggcagaggcagaggcaggaggatctctgggagttctaggtcagcttcaggccagccctagccacacagtgagactctgtcctaaaggaaggactgtatagaacaatcgtcttggttagagtggagttacgaggctgaaagccccaactatcttagaactctgtgtgcaacctagaagccaggagattcattggtagttgggttgggtctctgtgggcacggggcttgtgcatgtgtgtgggtcttgggaattaaactgaggttgttaggcttggtggtaggggcctttcctcatgaatcacctcagtagcccctagagaggagttttaaggaggcggtggagaggtgagctggagagacctacgaggaaaggtttgaaaggagctgtgggatgaccaaggaacagtgcagaccagtgagtgcagcactagtgtgttgtattgaaggacgccaagactactgtcattccacaggggaggaagaggagagggaagcaggacacaagtgacgtacagctagcatgtcacacaagggacctgactcttcctgtgagtgaggacagaaacgggctgatatgtaatcagtggcagagaaaggtttgtcaggcacacagccgtggtgtggctcctggagctaatcactgtcatcattataaaagaataaactttcatcagacattatagcacctgcctgtggtcccagctactggggcagctcaaatgcaaggatcacccaagataacaggaaatgaaaaccagagagcagaaaatgggttccaaacatgaagcagactaactgagcgccccactgtggctgccgtgaggagggaacgctatggtgggccaaggatagaaacacagagatcaatcccaggcccagtggctcacacctctcggactagttattcaaaaggctgaggcaggaggatggtgtgttgtgggtcagttggagctacaaagcaagtccaaagccagtttgagcaacttagagagactctatctcaagtaacaagagtgctcaataatagaattgctattgcagagtaatagggtataatagaattcgattatagcaataataaaattgctgacactggagtggcctaggtgctggagagttggctcagtagttaagaacatctgttacttcttgcagaggaactgggctcagttcccagtgcccacacagtgactcataaccatccataactccagttccagggaatctaacacaattctgacctcctcaagcaccaggcatgcatgtggtgcacacacatacacacaggtgaaattcacataaaataagtaaatctaggaggaaaacaaaagaagaatactaggctattgtgtctgagggcctagtatcacaaaggaaaggaatagaccagccattggaatagcccaggtgagagtttatggtggtgtcactccgcgtggcagctgtgggctggcaagctgctcagacagatgctgggcatacgctgaaggcagagtcaacagctggctgtagctgagacactacggagtcaaggatgccccacaggcccagcctgagcagcggaggcctagacctgtggctaactgagctttggggttccaaaggagcagggggaggccctctgagcatgctcagtgtgagctgctgttagacaggaagaggggctgctgagtattcctctcccccacatgccactgaagctgacaactgccacctgccatctcctgcaggacaagaagcttatcaaggccttctttgaggtcctggcccaccctcaaaactacttcaagtacacagagaaacacaaggagatgctgccaaaatccttcatcaagctactgcgctccaaagtctccagcttcctgaggccttacaaatagtgcctgtgggcccgagacccagttcagagctcccacctccctggccctcagagttggcaccccaacctcagacaagaaactgtctctcttgaaggagagatatcaccacaccaggcgctctccctttcggcctttctagttaccttgtcttcgttctgtctctctcctggaagtcattcagtgcgtctctgttccccccagaggtgaaggaatagacaccctctattcctctgccgttatagcatggtgccttgctagccaggagccaaaacaccccctccacagcccccgtgctccccagagtgggtcttcacagcccagagtcctgccaaagaagccttggacatagcagctttgtgccagcatcaggctgctggggcacagagtttaagcccggggtgcccacacagttggcgttctcatctgtagagcttgctctcatctggccggggctgactccatagggtttacaagtgatccataccaatgggatagcaaacccctgccgggtaagggcgaggagcaggcaggggccctggacatataaagctctcagatagctctgcaggacagaaagcgggtttttaaaacattgcccaaaacagaaagaaagaaaatgtgtcacctaaaggaacttcctacagaacaagtggaagccagcctcaaacactaacccttttcttgccagtaccccccgcccccggccgtgccctcaccccacctaagggctccctgggggaggcctacccaccccctggtaagcgctgtccttaaagaagctgggctgttgactttccaagcctagaccttgctccacgggtgttttcccttgtagccccaggtggcttgtgggttccaccaaagaggaccccactctgcagccagcctggagctacctacctctagcctcgggctgtgggcagcaggaggaacaagtgtgagtgcccttggcaagccgcctgtccaccctctccacatctgagaagtgcaatcattttgagtctttctatgtcgtctagagggaggggggattgtttttttgtttgtttctttttcctctcagaataaccctatttatagctgcctaggagagaggggtgtgctgaggctggagaaacagcagtctgtctgtcgggagccttaagtgccggagcggctcatatgtctcagtcctccctgaggccacacagaacttcagagccctcagcagcgcagagctagggctatccctcagaggtgccccaagcacaggagactagctctggtaacttgatgaagcaggaggaggaggcttcctgactgagctgatcctgcctgccttgtgtctctctgtggattcatggtaacagaagcagatggacttggtcagaatcttgtgcgagtagggacaacctgtctttccctatcttcatgctctcccctgacacggcatgggaggggatcgggataaactctatggatggccagcgcaggctcccaagacagccagagagggctggagcagcctggaattggacagttctccgtgtatgaagcgggggaaggacaggaaccagacgtgtgcctgagacctgccacctgcctcttggagctgacttcaagcctgattcaactactgtctttcaaaagaagaatggtgtctgtgcctgagcccgggctctgcatatgctccacccttaacctagatgctgcctgtaaagtctccaattgttccttcttgttccccgaggcttagtcctggacatccaccaatgactcctcaggtccaactctaggtaactgccaagagattcaactatcaaatagtctgatccccacacacaccagccagcagcaggcgaagctcgcttcctggatgccttagccaacacggtgggggtgagggtcgggtggggtcagagagctattgcaaagctgttgaatggtttcatgcaagaggggcgaatgggcatttagtgggtccccagaagtgccatagaacagcctgagtcacgagtcctttctccctaacattttgccagctcctggaaagccacaaagtgagagtgcctcccaatgtatgcctttagggcgtggcttctccgcactcccccaccccaccccccaacccccatctcaccatacatacacggacacttcctctaatcatttgttctatggctgatggggcagcacatgagatctatcgtacggagagagtaggccactagacttagctgatatcaagatggatggaggagatcaagcaagggctttctactgccaaccaagttggcagcaaggaatccaggcagagctgttacgaacttacaggggatattggccctgagcgcctcactctgggagctgagtgggctgaaggaggagttaagaactcagggactttctaggactgcacaggttagacaaaagaggtttccaggagaaggggggatgggaagatggtgtgaacaggaacccttcgtgagctgacctagaagcttctctgtgggctatggtgcttacgaggtcatgtaaccccggcgcctcatccatcccagtgcaagacctgctgtgaactgagtcccagcgtgggaagccatttccacatgtgctccaagcacggagtgacaaatgtcaagcaggccctgatatcctcagcagcacctcggtgcctctttagcctctgcctctatttgtgtcattgacccagccagtccccaagcctgaggtaattaggagaaagccgaccagagcctggacgttagctgcccaccctgtgccttcagtgatccttcgaggactgccactggcctcactacggtcatttccatgtggaggtgccgatggagaagatggtacagtctgggctctggctcctaggagtctctgtgaatctgcgaagtgttctccatgagcgcgcctgaggtgacttaaatggattaggaagtcctatctcagtgtgtaagagaaagcgacagcacattgaagggcctgtatctgctgctgagctccagagcaggggagcagaggccaaatgtaactgaccccaagcaggacatggtgccccgcctggttcctttcctaagcagactccacgaaggaaccctttctgtcggccctgtctcaaagctggtgcactctgtctttccgctattattcggactgagaacccgaaggaccagaggccccgttctgcgatcagcttaccaagactaaacaatggcagcagtagtttggacaagctcaaaatcttgttctatgtgagtcggactttcagagagtaattatcatgtggacggctttttttttctttttaacgcagaagaatatcttaaaatactatatttatatctgccttccactgcctctcatacagcaagcatctcagttgacaataggcagcagcaatgtggtacacagagtattttgcacttggggaaaaatatgtatctgaaaacttgtaaaaaggaatgtttggattttgtattgtcttttttatattattaaaatactaaatgaaactccgaggtctagcaagcatcctttcctctacctcaaaggcttgtcctatagctgggggcccgggggggggatcttaaacactcaaaggtctcttcttctcactgccggacaggcctggctcccccctcccacagctcagcttattcctaatgattttaatatctggaaattcatgtctctgtctacgtttaaaagcaacgttggagacttcccctcgctgagcatgacagcttaggtctttaatcccagtattaaagaagcagaagcaggagtttccagacctgcgagggaggcagaaccagcaccaaggtcaccgcaccccagcaatggagagctgtcatccgacatccccccctctgatctttactcgtagctcagcagcagagcgccatgcctagcatgcccgggcccttgcatctcattcctggtaccaagagaataaaattctactccacaacagcttcctcaccaatctttcggacctggaatgttttagaaccgttgctttggctgggtatagtgactcacgcctttgatcctagcacttggggagggagaggcaggcagatgtgtgagtttgaggccagcctggtctacctagactaagatgcaggccagccaaggccacgtggtgggatgacaacttttatctcttccttcagacaaatggtttctgtgtaatggagaggaaacgaaccgaataccatctgcaaggaagagctatctgcccatatggtaaagggtggtggcgctgagcagacatccaggtcactcggaattctagtattttcaactcaccagaaaactaaaagtgatcctgaactttttcattgagtatgtgtgtgcatttgtgagtgtatataagcaagcactgtctgtgtgtgtgtgtgtgtaagcatgctaccatgtgtctttggagttcagaggacaactgggggaaacaggttctcttttcccaccatatgggttccaaggatcaaactcttgccagccctgatggtgaactcttgaccctcctggtttcacctccccagtgcaggggattacagttgtacaccaccgtgtctggctttcttgctgtatttctaaccaataatccgtgctataaaaccctggaaagatcccatgtgtgtcgtgctaggatggcagagctggctctaactgggtatatactagggcaccaggtggaaattccagtaccacactgggacctcggggttaacatgcccgtgccaaggctcctcccccttcatcttcttatttttaattggaagcttattttctctcaatttctgaaaatatcctgaaccacaattcctccctgcttggaagagagataataaaaagaacttttaaagttaggtgtcaggtgtaaagatgaggcaggaggatcacaagttcaaggccaccttgggatccacagtttgagtccaaaaaaaggacaaaactatggaaaaacagagaagaaagggggcacttggttttgttcctcacactgctaccctatcaaggggacctgttggttttggggagctgatggaggaatgaatgaacgcccaagaacctgagaagactctcggggcgttgtccctcaggggtcgaccatcagagtgtcatttctcagggaaggcagtagaaggaagcaagtgttgtcagggaaccttccttcagagagaatcatccctcaggaagatgagtcgagcagaggggaacgtcagggcccttcctcaggggacaggatgggtgcaccatccctcataaacactcacgttccccagggcatatgggaaaagccagtactgcagggagaattgtcccgcaggaaggactgtcagggctccatccttcataatgctgtccccccacccccacccctcgggcatcttcccacaaagtgcaggaaggattgtccctcggggtgcagtccatgcagaaggaccatctctcacggagactgtccacagggaggaccgtccctaagtccctcagggtgctgagccccagttcaccttctgacagagcgggagagaagcgtcccttagggtgaagtcccagggggaggaccatccagcagagatgactgtcgggacgccatcccttggggcgccgttgcacagggcgctgggaggactgtccctcggagtcccatcccctccaggcgtctggtcaccgtcctctgcaggaaccacctagagatacctgcaatggcttcctcccgagcagcccaccgccgctcgattttttcccccgttgctatggcgaccgcggcttccacccggcgtcgtgacgtcatcacgccctccccgggcgcccgggctggcgaggccgcgtcacccggcggccagcggagagaagagcgaggcggagctccgaggctcgcctgaggagactcggcggcctgggctccggggcccgggaaccgggataagcaggccggccgccgcggcggaggggggcgggctggagcgtggccccgcgctggtcatccgggttccggggcccggcggaggccgcgccgggagcnnnnnnnnnnnnnnnnnnnnnnnnnnnnnnnnnnnnnnnnnnnnnnnnnnnnnnnnnnnnnnnnnnnnnnnnnnnnnnnnnnnnnnnnnnnnnnnnnnnnnnnnnnnnnnnnnnnnnnnnnnnnnnnnnnnnnnnnnnnnnnnnnnnnnnnnnnnnnnnnnnnnnnnnnnnnnnnnnnnnnnnnnnnnnnnnnnnnnnnnnnnnnnnnnnnnnnnnnnnnnnnnnnnnnnnnnnnnnnnnnnnnnnnnnnnnnnnnnnnnnnnnnnnnnnnnnnnnnnnnnnnnnnnnnnnnnnnnnnnnnnnnnnnnnnnnnnnnnnnnnnnnnnnnnnnnnnnnnnnnnnnnnnnnnnnnnnnnnnnnnnnnnnnnnnnnnnnnnnnnnnnnnnnnnnnnnnnnnnnnnnnnnnnnnnnnnnnnnnnnnnnnnnnnnnnnnnnnnnnnnnnnnnnnnnnnnnnnnnnnnnnnnnnnnnnnnnnnnnnnnnnnnnnnnnnnnnnnnnnnnnnnnnnnnnnnnnnnnnnnnnnnnnnnnnnnnnnnnnnnnccctccatcccgccctgagactcctcccccaggactcccaaaccccgccctcctcctcctccttgaccccatacacacactcctgacccccagacctcacaaggcgacccccaattcattgagtgctaaccccagccctgcttctggaccctccagtctcagtgctgatacaatcattacatggcttccaagaggcccgtagtccctagtgaccccctagactaccctctgtgggcaccccttagtcctctcctggcttctgcaaaccagactcgggctgtttcccacccactcatccacataactcgtgatcttcgccccgtaacaccatgatcatctcaccctcctgacatccctctttaacccccccccccgcccccagcctccagtgtcaatcagcacatacataacttatgcccactgccatgccaccgttgtggtgatcaagagtaaatggaaatgaagtatcatttgaggcaggaaaggattctagattgagtgtgtggttcaagttcaaattctatcatgttgagctttggaaaccttggtggaggtcctttccttacggtggacttgagtttctgatcagaactgtgatgagattgagtttggtgattccccaatgtttctttctattaaaattctgcaattcttagtcaagacaaaaatagcgaacttttttctacgctgcctcagaaatgtagtccttgtaacctcaccctcccacccccactcccaacctgggtctactggctttaccgaacagtatttcttcattcctgtgattgtctacactctgccccctcaattggactctatcagtttgtaaagccgtgcagcacagagcttcccactgagttgacatcatgagcttggcccttcagctggggaacttttggcaaagcatttaaagcctgaggtaacaggtgcagaacattcaggacccttctgcctcacaggaaacctttacctttatggtagaacagttgtttttagtgaaggtctaactactgggtgctggagatgccacagacaccaagcatatggcccacgccagtcactactgctgccatcttggaatccctgtccccatctctgatgagtgccttacctctcacttggacctttttcacagccccttagtaatgatccccctgccccagaaactactgtatggcaaactttatttatatagattaactagacctctcacaggccagacctattagctctttctgtcaccactccctccctgccttttcctgagagttgctttaaataaaggaatctggaattgatacatttgaactgaccatgctagaaaacccacccactcggttgtctctcatatcctgacttcctggttttccaaattctcctcaggcccttgctccttgctttccaggaattcttaaattcaaccttcgcccatctaatcaccctcaagggcttcttctccttgtcccatgactaagtaacttttctcaccctcttcatgacccttgacctcttatccccccaagaccccttgcaccttatgtggaaaggacaccacacccttctttaaaacccctatctgaggctcctgtaacaaagggcagattaacaggcgaaaagcatcgcagtttatttagtttaacttactcgatgcgaagctttcagttaaggaggtgaagacctgaagattagacccatgcatttttattctaggctcggtgaagatggaaaatataagaccaagaaaatgcagtaaatgggggagggggtgtaacatatcaagccccaaatgttcaggttcttgcccatgacccacatccttaaaagggtgctttttttccctcttatgttgggtacgggaaggcacagaggatcttaggacctgcttcagaggagaagataagagagaccttgcttctcacgtcctcagattgccagcgtttctgaaccaagttaaccctatcggctgtcctgctaatccagcgctgtaccactaaacggtatccctgtgtctgcccttggcctcggaggctcccactcagtgatgtccctgacatcagtcacccttaatccgttcctggtgcatatgcctggggaatctatgtgtccccgtgctgtgggaaacctgctttcagccagcagcagtcttgctcctcccctaacttttgccatcctcagccacatcccgatctctgaaacctctaattagcgctgctagtgaccttaccatttgcctagcttctgagaaatgagtcgcttctgccccagcacggtcccacccttcatgcacctgcacactagcccattcagggatcccacctttgtgcccacgcccctgctcagatcctgcgtctcccccaccccactccctgcttccttttcatcaagtattccttacccctcttcctcacagggcccctgcttcctcctccctgttcctgtcagtaagtgtccttacctcacggatcttgacaaacttgactgtactgtgcctctgcttcctttccagttctgctcttgaaatgtccatggcttttggattctgagacccctactttcagttgtgtaggagaggcaccccaaacttctggtttgtcccaagaaccgtgctccaggaacgtctgatggattcagatgctagagacccaggagtctctctgtctttaggtagcaaggagagagcccttggaaggcctttaggactgatgtggctgtgtctcccgaacacactcttgttcccagcctctttctgaggccactgcagatcctctgaggctagagtgtgctgtcacacccccactggcactgaattagtcctattgttttctgagcccttggctcccctcccactggaagctggaatgtgaatagcagagaaggtgccccacagtctgttctgtaggtcacccgaatcccagtgttggctgtagagccataatcgttgaaggtgaaatggcaggatcctggggtggatttcagaaggatcgtgcccacttaggttgcttttatgtccttaggacataatctgccttatggctctcctccctgtgacttccttgagagcagagggcaaatccctttatcatctgacatcttaatgccccccccccatctttggacagtagtcagccattgctggctacactgagtggaccctgaattccttgtctttagaaggcagtcagtcagtcattgcttcctgcactgaggaaactgaatttctgcgtcactgcaaggattagaacacattctgtggccacttcctcctcgcacagggccctctaagcatgctagcaggtcagacatcgaggaacttggctgcctctgtttagtcatctttctggtgaggcaatggatggttacgctgggcttctcgggttgtttgcttttgggtagtaagttgaggagacactagacttcaggccagatggctcagctggtaaggagcctgatgacccaagtttgattcccagggcccgtatggtaggagagaactgactccaaggtgtcctctgatggccacacggatggcacggcatgcctgtgggtgcgagtgcgcacacacagaaaaatgaagagttctaagaagagggtgttaggacccagtggaaacagccagggactggtttctatagacttgttttggaaaaaaaaaaaaaatggctatgtgaactgcttaggtgagagcagaggaccagtcgctagctggctgttggaaattgttgggcctgcgaaagttttaatactactatgtcagcttttctgtgtttcagcggtccacatcaggagttgggggttggggaccagatagatgattacgtaaagtttagccccgttcctcagaaaacacctccagtcaaatgagcttctatttgaatcagagctgacctaggctgagcaggctgcttggccctgaccggtatctgacctcttctgtttgtgagacctcagaaggctaaacttaaaccgcactctgcagacgtctctgccgggagtttgggacttgcactatcctagcaactagaacctgttgccctggtaccaccccgctccccagctccggtgctttcttgtgggaaatagctgactggatctggagaaaggtgaggcagtgggagggtactcccctccgccgccccccacccccaggttagagaagctaggctcagcaaggatttctcctgacctgttgggagatcctgaaggcatgggggttcattcagtcctccatccatccatccatccatccaataagtccttggttgatgtctgctatatgcaaagcactcttttaggttctgggaatagagaactgtcaaaaaaaaaacaaaaaacaaaaaaccccaagacaattgaaacagtgaagtagagtagagagggcagccaggattattgttttagtcagagtggcaaggaacttgttactgacaaggtgacatttgaacagagaagatgaagctggtgtgtgtatctaaggaaggttatttctgtaacagtagacaagcaagctcaaagggcctgaggcagaaataagccaaaatcatgaggagccaggcagtacagctgtggtacccaaatggctggcagcctgacaagggaaagagcaggagccgctgaggtggggagtagattgcttcttacaggccaccagccactcgaggagtccaggcagatacgtggcaggatttgactattgttctgaaagtccctctgactgctgtgttgtgactcagttgcgttggggcagagtgaaaagatggggtgctcctgcagtgggaagtgttggggtgctcctgcaatgggaactgacagaaggctcatttaataggaactgttgggggtcctcttgcagtggtccagaaaaggaaagttgatggcttggatccacagtaaaggagtgagagagaaactgttggaacgtggccgtactttgaaagaggcacctagaggtggatgggttgaaagtgtcaggtaaagacactgggaacagctcccaattcccattactgaaggagggagtttggaaagtcagattgtgagaaggagaggctaggacttcaccccagccctaccccccagagtcagagtctcctgcagcccgggttgggctctaacttactgtgtagcaggggtgacctgagcttttgactctataatcttacctgctgaggaatgggattacagacatgcgccaccaagcccatatccccagccccagaattcacttcttttcttttaatattggaattcacttttttgtttggttttatgtttgatttggtttgggttttggggtttttttcggagtcagagtttgctctgtgtagctctggctgtcctagaataagcttgtcacttgtgagacccttttagacagcaaaatagaaccattgataagcagctcgatatatagatctgtggggccctcgtactgcctgctctcccagtgccagactgcatgtagaaggaaaagctggagggttaggagtctgcctggactctgccagcagggagccgtgtgatcccacagctcctggcttcccttctaaacggctaccttaggctagaagggagctgtcacctcagcccctcttgtgagcattggtgaatttagaatgaggaaggcagcaaggcacctctgaggctgtgattctgcccaggcagtgtgtcggtgatagatttcctcctttcttcctccattcgtacagtagtaaccaggagcaccccccacgtgtggcctgagggagactgagcctgccctccgggagcacggcagtcggcttcatactaccaggcacaagggcctccacatgatgcactggtgtgcaccagggctccagcaccgtggagctggaacctcaccggtcctcagagcttgctgctaactagtccagccaaccagtcagtttcagagactgtctcagaaagtaaggtacagagtgaccgaggaaaatctcgtgtgagcctccagcctctgtgtacatacacactcaatacacacacgctcacacttgcacaaacatacacttatacattcacacacagaagcacacatactcacataaacatacgttctaaaacataaactattccattaaagggatgtgccatagtttgcctgttgaggacatcttggtttccatgagtttgggctttgaatgaatatgtctgtggaggtattcccagttcacgatgaaaaggagtgatcactggatcacatgagaaggttgtgccagcaccaacgtaagtggctgccaggctgctttccacagtgactgtcccctctcacactgccgtgacaggagacaagacttcatgtcagccttcaccctggccctgtaggatgttgccagtgttctggaggcacctttctgacagcctttcagggctagcatgtttccagccacctcttctccattacggtgtctctttaaaccttcgctttctttattgtcttactgagatagttctcactctgtagccttggcttatgtgtaaccatgctggcccctaagttctgtggatcctcctgtatctgtctgccttgtaggtttacattgtgagctccaacacagtttgtctctgtggttttagtatattttgtagatagttttttgattctccatctattggttttcctgacaagctcttttgtccattggctttttttttccttctgaaagccaaaagtactttctcttcctcattaagattttgcatattgttccactttgatatcttaactaaatggtgttaatggtgtgtccccacctctcctgatgctgatgggatatgtcatttttcgcaagaacggtacttgtcaagccgtggtgaccacagctggatgcctttatcactgctaatattttcttcctttcttccttccttccttccttccttccttccttcctccctcccttctttcttcttcctccccccatcccacttcctgtcctggcacacatgctcatcaagtgttctaccacgcgttgcccagcccagcagcacacatcttcactccgctgcctggtcgcacatccaggctgaagcatccctttccttcttaaaccctgaggtgcacaccctggaagcacatgctgctgtccccccaggnnnnnnnnnnnnnnnnnnnncctccctccctcccttcctttctttcctttgtttgtttggttttgggtttttgtggcagggttttgttgtcgctctctgctggcctggcatttgtggtctagtccaggctgccttgcgatcacagagacacacctgcatctgccctctgagtgccagaataaaagtaacgctcagagggtggctacgccacttgtgccatttctctatttcagtggggaaaaaatgaaataaaaataaaggtacactctgctaatttgcctattagtccaaagttagtataatcttccaacatgccttgattctggacattcctgaactgaaagtgaggatgagagccacctgtgaccaccatcctggatggtcacaagtggaggtgttaaatgcaatgtgtactcaagattccattttagttgaaatagtttccgttccataatgacagacctgcatcccctgtgatttggaactggaagtaatccactctgcctggccacttgccttgttgtgacactcacagcagtatataaccatgcaagcatgagctgggcttttacagccagcctgcctttggcagggatgtgtgtgtgatgccctgagcagcgcaattttctgttactaatttcctgttttctcttcatggtttagaaaaccacagaactaggcttgggtcttgatgtgcaccgaagtccttttctgtaacagcagatacagaatcagtttgttaccacagctctcccagatctgtatctgatttgtttgccccttgtccccatcagcctttgtccctcccagactaatgtttgccatccacgagaggcttggatgtggaccagatcagagctgaacctttgctaagtgtggaacacaagtgcgcatgctcccttcagactcctgcctcttgcagatagtttacatagagcaggctgtgtggagggacctagagacaatccgctcatccgcaaagcctttcagaagcctgcatcccctggtgccttggcaataggagatgcatctacacaccacagcaagaggattttctgcattcagtcaataggttgagttggttttaaaaagtggagcaagctgctggggctgctctaaaaagtcaggagtggttgcttgaggtctggttgtcatcactcttgtctccctctcttcccaactgcccctcaccgtacccaggagctgataaaccacatacctcctccgtccatcttgacgctgaaatgcccactgtgggcaggaactgcccagacagcctctgaggtctgcccgtcgctcgtgagtttagtgctagcataagaggattcagagtaagccatcatttaaagaaggggaagggaggccaagcttataggctaaaggcagatggctgccagtcaagactctcaccccttagacttgatgcaccaagactcagtgcacaaacctgcaatctcagcttcagaaggcaggaggatcacaagttcaagaccatgctaagcaacctagttagaccatatctcaagcaaaagggaggaaggaaagaggaagggagaatgaggaccatggctcgtgcctggggggacagcagcatgtgcttccagggtgtgcacctcagggtttaagaaggaaagggatgcttcagcctggatgtgcgaccaggcagcggagtgaagatgtgtgctgctgggctgggcaacgcgtggtagaacacttgatgagcatgtgtgccaggacaggaagtgggatggggggaggaaggagaaagaagagatggaggaaggaaggaagggaggaaggaaggaagggaggaaggaagaaaagaaggataggtttggttttatttgggtctaagaagggacattttgggaaatgtggctcccagcttctccagccccaattccccttgtcgtggcagatctagaaggctggggtgaggttacagagctttgagtgctaacagtgctctatactttaccagtaggaagtgtggaggcccacacctaggccagccagcccacttcagcagcagctggcagctttgggaccttgggccgatcattttccctcctagcttcagtagcctcatctgcgaggggttgtgtgcgcctcctcataaagcagtgtccagcacatgttaagggtgtgtccgtcatcgctgtgttagcttgagcagtgggaaggactgtaaggccatcggggccaacgggcaaggaagcaggcagggaggcagaaacctcttctgcagagagccatccagttccttcatgaggacctgaactaagatggtgccatactccccttccagagcctccatgctggagtcctctccatgtgcctgtcctgtcctgagtggcagcatgtgcgacctcatctagcccttacaataacctaggaagcagtgtctctgctgtctcagctgcagcatctgaggctcaagagaggctcatccgtttgctatccgactgcagagccctgtagagagcagacactctaaattcaaccacctgtcactgtgggagctaccaacccagccatggaagctagaggccattctgtctctccagcctgtggtctgttttgtatttaggccaagtcttatatgtgtccttatttctcacgtgttgtggttacagtaaaacgggttaccaaaaaacaaaacaacaacaacaaaaacccaaaaccaaaaaaactctctccctgattaagagaatgggagttaagagttgtagagcagtccagaaccagtcaggaccagagatcccagccaagtgggtcgctcctagacgagatggttcaggtctgagttcccagaagctgttcccgtttgattgatttctctatacctctctgatagccttagacaacgtctttaaaaatgtagacaaggggctggagagatggctcggtggttaagagcagagactgctcttccagaggtcctgagttcaattcccagcaaccacatggtggctccacgtcatctgtaatgggatctgatgcatccatctggtgtgtctgaagacagcaacagtgtactcatataaataataaatagataaaactttaaaaattaaaaattaaaaaaatatatatagacaggcctgtgttccacaagagtactttttagtggtctcagggtttttaaacccctaggagaccctctgcacttggcaccatcgtagagaccttgggtgctcattctttttgtttgtttgtttgtttgtttttttgttttttcgagacagggtttctctgtgtagccctggctatcctggaactcactttgtagacctggcctcgaactcagaaatctgcctgcctctgcctcctgagtgctaggattaaaggcatgcaccaccatgcccggcattgagtgctcattcttgatcagatggtgtgggttcaaatcctcctctcacacttagtagctctgcaaccttgagaaagttatttgatgtcctaggactaaactgtgaaatagagaaaataggaccaacaaggccgggccatagataaaggcatttgctgctgaccctgaccacctgagtttggtccccagaaccaacatgacagaaggattgaaccagctccctcaggttgtgctctgacttccacgtgcacattcactcacagagaaaatgtttttaaaccagggaacataacagtaccagagcgtagagatgtgagcatatccacacccctgcgttcccattgtgtgtgtgtagagatgtgagcatgtccacacccctgtgttgtcattgtgtgtgtgtagagatgtgagcaggtccatacccctgcattcccattgtgtgtgtgtgttgctggctattgctgatgccgctccctgaagcagagcacattcgggtaaatgttaacagactaagtgagtgagttagttattctagtgaagatgccaagcttagggtggagcgacacagccaacgtgtcccaggtggactgtagttacactgcagcactgatctctcaaccctcgaggcacaaagctccagcttgtcacttctggcctcaagcaacatgtgcccagtgacacacaaacatcctccaggtatatcagtgtgaaggcagagcatcatctggggtttcaaggttaaagtaggcagtctgggagagtcttaattttaatgatcaagatggctgtgtgggtaaagacacctgtaaccaagactaacaacctgatacatgggatccacacagtgaaaggcaggaaccaatccctgcaagccgccaataaggttaagaaaggaaaacgcctctttagagaatcttaaggagaccaaaagcaggggcagagggctcctgacaggtcacatatgagggtctacaatggaccatgttctgtgctgctaggacatagcaagtcatgtctgtgtacagcctacagcacacagggctggtgcagccaccccaagccagaagagccacgtagaacccaggttacactgataaatggtgaaggacgtgagccccaggaagaggaagggccccagcttctgggagtaagcttcatatttgtgctggggtttttttttgggggggggtgtcatcctcacagcttgttagaaaataaatcagaaacagggaagacttggtctgaggacacggttaggtggctctgagtgagaagtagcctgcctttttatgagcagaggactcagggtggatggaggtgccatccccgagatggaaatgttgtgaattctgttagggacctgctgtttgttccttgaggatggtcaatagtgccggtggatggatgggtctgagcacaggatagaccatggagtaagcacagacaaccaggcagagagcctgcctgcctttgacgggaagtgagttcagtcagtgatggctcagtcagtcagtaacggctcggtcagcggatttttacttcacaagcatcttgaccaccatgcttctgtgcccaccattttgaattaactctgtgtgtgtgtgtgtgtgtgtgagagagagagagagagagagagagagagagagagagagagtcacactttccataggaaccagcttaattctctgaagcagtgtctgtgtgctcctggctggcctcgggccttgttgatcacttgcaacaggagggagctgtgaggcttgctcttgtttttgttttgttttgttttgtttttgatgtgactttgtccattttctcagattggtgacccagaaggaaatctgtgacctcagtggtgaccagaagccaacttcatgtctgaaggcacaagtggcagtttgtcatggaaagcctggggctgcaaacggtgaggctcagtgatgggacaacagcctacgtccagcaggctgtcaaaggtgagtgttctggggaccttggaaccctgcccgtcttccctgctcacctgcctgctggcccccacctggtgcagctttctgtgcctgcgagggacttctgtgtgcacctgacagaaaggggactcgttagaattagggaccagcatgtgcgagcctaggccgcctactttcagacacccctgttccagcttagggtgcttcctggacagaggcagtccactgtcttgactgaagtggatgtaagtgctgggggtgccgttctgagtctctgccctgtacaagacactctaggcacagcaggggccccacaaatacaatttatgcctcagtgtctgacaccagtgggcaccaaataaacacactgggttcacggagagacttgaatctcagataagtaatggttcttcaggagtgtaggcctctcctcagacctgcacggggcatgagtttataaccatagcattgaagactaaaacaactctccaggcatgtaagtacacgctgggggcacggaggctctgtcagaggacctgagttgggttcccagcacctatgatgggctgctccagggaatccaacaccctcgtctgatctctgaggtaactcacacacacatagcatgcatacacacacacaccatgagcatatagacctaaataaaagtagaaatgttaaaaagctgtttatgaacagacaaggcctcctctgcgcagacacttaggagtagacacgtgttgggttttggagacctagggtttggaatgttcgcatagatgtgagcctgcacttccctaacctgctgggagttcacgcactgcagacttaggtttcagatgagggatagtcacactgagagtttgtcatttgtgggaaacgcagacttaacagccatggagagcccaagcctgaagtgctgttgggcatgggtacctctgggcagtgctcctgcccaccgctctcagacgtgccccgtgtggtcttggcctccgtggacagaaacgctgcctcctccttccttttccagatcctgggagcagcgctatcctcataaccacattgctgcctccttcagttcaacacacctaagaaaatgtccaggcctaggtgtgcggatgcctcgtttagtgctttgtcatttaagttatgtgggctttctttgttttctttgcttttgttgatgtttatttgagacagggtttctctgtgtagccctggctgtcctggaactcactctgtagaccaggctggcctcgaactcagagatctacctgcctctgcctcccgagagctgggattccatgcctggccaaaaatttgtttcttgacaatgaagtgagatagcccttgatgtcgtcaacaagctcttgaggtggcttcggaaggcctgtcatagtctgtctaggatcgttctcctgagaatgtgttttctctagaatacttctgaagcccgtagctctctgtccctgcattgtctgtcctgtccctacacctgtcatggtgcagtctgggagagaatttgggatttctaggtggggctgtgctttctccttagaccctctcacttcccttgcttcagctttccacagagaattactagttaatgaattaaagcggttggcagccaaccctcaacctgtagtctctgccttcgggagactaaggcaggtctgtctcaaaagaacagaatagcaaaaaggcgagctgtctagccccagaccactcttcttaaatcttttcttttaaagttatgtctttgcctcttccacctctctgtttctctgtttgtgactatatacattcacacatacacacacacatatatatataggtatatatgtatatgtgtgtatgtgtatgtatatatatatatgaatgtgtgtgtatatatatatatatatattacatttcttttattttttatgaatacactgtcactgtctaaagacatacaggaagagagcatcagatttcattacaaatggttgtgagccaccatgtaccatgtgggtgctgggaattgaactcaggacctttggaagaacagtgagtgctcttaaccactgagctgcctctccagcccttttgtttctctttctcccatcattcttctcaggtctgtttcttacctcccactgggttgcaatatgtgtatccatgtgtgtgcacttaatcacactcaaataaatgtagttgtaaatcttttttttaaaaatcttacatcagaataattacttttacttttaaactcagccttactcaaaatcttaggacatgcatgatattctttgctagaatgtaccattcgtggtcctctggtctgtccccactggagtcctgtcccctctgaaggtgcaggagcctaatctcaactgcccacttgcacttggcatcctggtcttttgaactcacacaggaaactgcttattaagttccgcttacagcagcttaagccttctctggcttgctgctccatacttttccaaagtccttccacagaaagttcccaagacctaagatccacactgccaggtcacagccacatccctcttctctggcaccagttcctttgccttgctgggacaacataaataccttacgtgaccgatgtgaaagagagagggtttactttggctcatgtctttaaggtgttcagtcctagtcatttggccccatgtacttgagcagaacatcactgtagacgggagcctctgggctgtaggagagagctgttcacctcacggctgacaggaaggaggaaatgaagcagaaacgggccaaggggaaacacacacacacacacaccccacatgacctccaaggaccaacttcttccagctaaacccacctcctatagtttctagaactttctaaagcaaaagggcatttgccattcaaggttatgcataactatggagctgaggagtcacaactgtgcagagcaccagaacccatggagaatccctctaggggtgagtttggggattcccctgatgggacaatgtcagcagatagttgagtcagaagaggccagctgacgtttctccttattgcagggctcagttcctgagctgaagaaagagtgaacacatctcctgcattgacttgtcagtctccctgtctttctttctgtcctcactcccattctctcccaagagaacagcctgagcagggagcccttgagtctgatcccaagagcccactcaggtgtggtggctcattcacacttaggtgtgaaggcaggaagacaggaggaattcagggctatcctcagctctatagtgaggataaagccaacctgggcaacttgagacccccatctaagagaagagaaaagagtccaggacacagtggcctatacctgtggtccccccaaagcacaagagacgtaggcaggaggattgcaatatgaggccagcctgagccacatatcaagaccctgcataaaataatcaaggtttagggatacacgttcctggctgaagcccttacctgacatgcaaaggctaaaggttcagtcccagccctggaaaggaagaaaaagcctggcaggatgcacactcctgtaacctcagcatgtagaaggcagaaacaggagcttacaatgactttgaagtcttcatttgtctggttagcaaactccaggccagcatggactacagagcaagatcctgtctcaaggaaagctttggtgggtggggtgggagtggggcttgaggttgcatagatcaagtaaggaaacatgctcacatgacagtaaggtgagtcatagaccccacccccacagtagccacactcagcctaggcagatagctcactcatggagcatgaaagtgtgagggcccgagttcaaccttcagcacccacatcaaaagctgggtgaagtggcacgtgcttctaatcccccagccaggaggatccctggggactctctggcccgccagcctatggaacctgggagctcctggccagccaatgagagatgctgtctcaaaggcaagggaaggcttattgaggaacatcacccaaggttgacctctggcctatgcacatgctcatgtgcacacacgtgcacacacgtgcacactcaatgtgcacacaaacgccacacacatatacacacacatgtacacgcacaggcacatgaatccacacctctctatcccttcacttccatttctttcgtttgttttttgttgctgtttttcaagaaggatctcttgtagcccaggctagtttcaagttcaaactgtagcagaggctggccttgacctcctgtgcctcctccaccacttcccaagtgctgggattgtagatgaacaccaccaatctggctcccattgcttttactctgcctgtggggctcaccagcgtgaaggctgcagcctatggagggctgagtgtgttcctgcctgctctctgtgagctcactcaagtccacagccactgcattaggaagagacaactattcaaaggagcatgcagccgagactcaagctgagtatgggcgcaggcttacacactcgggaggtcagtcctggccccagagtacattgtggctatcacccctaccacagcatgtcacagtggaggccccagattttggcacactgttacagggggaatgaggaaatctgttttaactgttagttggctgtgtatctgaatttcttggcatttgggaatcctccctggtttcaggatattctttgttctccatttagctcagtctgggcagctcaccgttagatcagaagttcccgtcttcacaggcctgggtagtaagaaaggaaattgcttcttgcagagtggcagataaagttacttcatggcaggatgtttctcctcagggcctccagactgaggcttaagaggtggcgaagggaacgtggtggatgttcccatgcttggaccataggcaaggatgcagagactcaaataggcatctgccacagcgggcaagcacgtggtgggcctctgccagcctggtccacttctctgcttctacgtccccaggggagaagctgcttgaagggcaagtgatccagctggaggacgggaccactgcgtacattcaccaggtgacgatacagaaaggtgaggcgccccagacacccatgtggagggaggtctggcagccccaagtgccctccatggccacaagctccagaggaggactggcattgctctccttgcagagtctttctcctttgaagatggtcagcccgtgcagctggaagacggcagcatggcctacatacaccacacacccaaaggtgggcccgtgggcatcgtggctggtggggagggaagaggcttggggtgagcacaagcaccctcttcccagagataagacccagctaacctggagaacagccttgcatagcttccctgggcagaccacgggcgtggggcagggagtcttgacatcagcgtaggtgctgtaggcgctggtaccttgtcacaccaggggaaggacactcactcatctttaacagtaggtgtagtgaccatgggagctcctaactactaaagagtaaacgcttaggctgggtgtgctggtcacgcctttaatcccacactcaggaagcagggcaggaggatctgtgtgagttcgaggccagcctagtctatataagcgagtctaggacagccagggctctgttacacggagaaatcctgtctcgaaaaagtaaaaaccaaccaaccaaataacagacaaacaaacaaacaaccaacaaacaaggaagagaggaagggggagggagggannnnnnnnnnnnnnnnnnnnnnnnnnnnnnnnnnnnnnnnnggagggaggaagggagggagggaaaggagtgatcattgtctggccgcagtctctgtcagtgtgggagcatacacagcagaacagagtcagacagccctgccccctgcagctcagctgtgatgggtgaatggcacactgagcagaaccagagtgagcgcctctgagcaagggtggatagactcaccaggggcggctgtgtgagctgctcccccttctgaccacgcctttttgcacaagaaattttatgcatccctagataatatagttatgtaaaattgctatacaaataccaataagaatcataaagaaatttacaactcttggcctggagaggtgactcagtagttaggagcgcatactgctcttacaggagacccaggcttgattcccagcacccacaaccaggcggcatacaatggcctgcagctccagtttcacaggatctggtgttctctggcctcctcagcctcctgtacacaatgatgcacatcaactcacacaggcactcttacacacgcatgcatacatttttaaatcctaaaacgccaagttctttgacagttccgccttcactgtgattgaagacaaatacagattcacatgctgaggtctcggctaaatgggccccaggatgatgacagatgcgagctgtagagcatcttcaacagtgcagacctgactgaagctcaatgccccatcacattgcgcagtgactgatggcagcagcgtgtttagagccatctcactatcctatcccagaccagaattcacttaacagtttttataaaattcaaactggcaatccaaactgcaggttttttttttaattaattaatttatttatttattatatacaagtacactgtagctgtcttcagacacaccagaagagggcatcagatctcattacagatggttgtgagccaccatgtggttgctgggatttgaactcaggacctctgggagagcagtcagtgcccttaactgctgagccatctttccagcccccaaattgcaatttttgttgttgttgttgttttgttttttcaagatagggtttctttgtatagccctggctgtcctggaactcactttgtagaccaggctggcctcgaactcagaaatccccctgcctctgcctcctgagtgctgggattaaaggtgtgcgccaccacgtacaaaaactgcaatttctaaaaatcaaacctatagcataatatagcccaaaggtagactgatttgattcttgttgagcaatgactttaggaaaatactatattattattttccattaaacaataatgattctgtaagagtagaaagtgcgtgcaaataacacagaatcagatctgaggtgtttcagtggtggttggtttgtgttgtgtggcttgttagcatgcagaatgcaaagtgtgtgtaccatgtttagaactgaggctgaacacgtgaggtcacatgacacaaaactagcagcccctcagaaataccccaggttcactgaacattttgttttgcatcagtttttagctgatgcccattcagagacattcagggatgcccagcttttcacagctccaacatcccattgaatagagccacatggggtcacttatccactgtctaagcatcgggagcttagggaagaggagtggcagggtaggaccggccagtgcggggaggtaacctttactggagcaatagggctgggagacccagcaaggagatgagagccagggccagggtgagtccagcccatcagaatagagatttgggttttcatcctaagactaaatgatgtggggtgaggactggccagtgtctgggcaggaagcccttgggagaatctggttagtgtgccctgggaggccttgtgcttgtgagaggcagtcctagttggaccaatgagaggaagtcaccacaatgaggccccctgaagagacttcgcacggctcccctctggtgtactctctgatcatcatctaaagccagggtctcagctgagtgtccccgcgtgctattaggcctaacctcgtgtgccctgtagagggctgtgaccccagcgccctggaagctgtccagctggaagacggttccactgcctacatccatcaccctgtgcctgtgccgtcggacagcgccatcctggctgtgcagacggaggcgggcttggaggacctggcagcggaagacgaggaaggcttcggcacggacacagtggtggccctggagcagtatgccagcaaggtgagaacctggctccgccacttgcccaccacctcttggcgctaccaaaaccctacttctctggccaagggtagtggtccatgctagaatcccagtccttggcatgtggagacaggagcttaaagccatcttgaaccacacaagatcctatctcaaaccaaaacaatttcactctctagaaaacagtggtgggtctgtgcttgggctcattctgggctaccctggcctcagcccatctgctccagctcttcctcagcccatctgcccccgcgcctcccactgctcttctctcctttccccccactggggccatgacagacagacagacagctgtgcactgacccttgttttgccctctgagaagggaaggctgctgtagggacagtggtttctgagtggcaggaagtgagcaccagccacctcaagctgcagtgacaatcctctgctcattgggaaagctctgcctgtgccttttcattagttttcccatccagtaaagtaagatgccgctatatttattgcttctctgagactgacttagacactggggaataaagccagcaggcagtgagcaggcctgtgcaccagagctgctggggctctgggaaagggagcctgatgagaggagccctggttacctgctgaggacagagacctgtgagtcaaggctagaccacagagccttggatggatggggcagagttaaccaaacaccaattaacctgcaagccgggagggtttagttttctaagtttcttagttttcctctaaaagaggaaatttttatgtctcttcaaaaggaagcacaaaatttactacaggcccctctggctacacctccagcccctgtgccgtagggtatgtttttttttttttaaagatttatttatttattatatgtaagtacaccatagctgtcttcagacacaccagaagagggcgtcagatcttgttacagatggttgtgagccaccatgtggttgctgggatttgaactctggaccttgggaagagcagtcgggtggggtgctcttacccactgagccatctcaccagcccctgccatagggtatgttaaaggccagatgtgaaacagaaagagaactaggctttatcaaaagcaagagcctcgaggtcagggctggctctgccaccgcctactccagccgtgggtaagagctcagtggaaccaggtgatttcagaagtcacttccacctgtgactccagcccatgatcatggtgcttgctccgaagcaaggtctcctttgaggagaagaagacatgctgatcagccccagcatcctaggtgtatggtcagcaggggttctaactcagcctagctcagggcaaccctgctacccaggagattctgctagataccccgaatacccagcctccctgctccatcagggctgcaccatcaggacttcatgtcagcctcgtggagtctgctagctgtccctgtctagatgtgtatctctgcctcaggtgcactctctcacacacatcatagatgtatgtttgtatatatctatgtatatacatatgtgtgtatacatacacacactaataaaaatcaatttatcaaaaggagtttcagttttgtcccctcccttccagaaccacctgagtccagcctttagccacaggagctatgctgtggggtttggatgagtgtttgaacccttagttcccagttggtgacactgggaacttttaaaaggggcagcgggaggtgtgccactgggtgtggcctttgagatttaaagcccctcccatgccactttctttctttccgggggtttttgcttgtgctgggaaactgagctctctgcttctctgttcctgccccgtgcagggttaattctgttcttcgggtcttaggctctcagctgggtcttgtgtcctcccttctcatcccctcgggagtacatacagcaacactaagatggttggtttttggtttttggttttttggttcttcgagacagggtttctctgtgtaaccctggctgtcctggaactcactctgtagaccaggctggcctcgaactcagaaatccgcctgcctctgcctcccaagtgctgggattaaaggcgtgcgccaccacatccggcattgttttttttttttccctcaggttctgcacgatagccctgcttcccacaatggcaaagggcagcaggttggagaccgagctttccgctgtggctacaagggctgtggtcgtctctacaccactgcccatcacttaaaggtaaggctggcaggtggctttgagccccgcctcttccctgtaagactgctctggcgccaccctggcccctccccatgtcacctgcaggagggaagatgcacatgcacagaagtgtccacatagaaagctgggacacagagtgtgggagggaagagaaccagcggactcagccagtcccatccctgagctacgggtttgctttccctcgcaggtccacgaacgagctcacacaggggaccgcccatacaggtgtgactttcccagctgtggaaaggcctttgcaacaggtaacatatctggatgaaggcaaggtctgaaaccagttgacagcaaagggttctagatctacttggggacctcacaaaggtggccaagcacagactgtgctgtcccagagagaccactgaggtgtctctgaaggacctttggaagaggctggggcacaggagagaggcctgtctcttgtatcagctctggcagccaccagctgtaggctgctgaagcctgtggcttctctggctttgtttgctctgggaaacaagggccctcgggctcagcttctctaggctccctctgagattcatgctctggaatgtctccgtctggccttacaaagcgtcccagggcactgtgggcttttccttggcaggatgggtcaggggctgtcctgggcctgtggagcatcctggaacatcacttaggatagagagcctctaaggcaggcaggcagggatgaggcttcgctgaccactcttcttatatcacaccacacatggacaggctatgggctaaaaagtcatgttcgtactcacacgggtgagaaaccatacaagtgcccagaggagctgtgcagcaaagccttcaagacctcaggggacctgcagaaacacgtgcggacccacacaggtaggctgggccctgctgccccatccccaggggctcactctgcttttcagattgaggcccagagcccagagctgtcctttcttgctctggccctcctgagctgtccctcaatcccctgtctgcacaggtgagcgcccattccggtgcccttttgagggctgtggccgctccttcaccacatcaaatatccgcaaggtacatgtgcgcacccacacaggcgagcggccctacacctgccccgagccccactgtggtcgtggcttcaccagcgccaccaactacaagaatcatgtgcgcatccatacaggtgggccagctggtgtgtgaggagcccctccccagaccccacctcccccttctgtgggcttctgatcggggacctctcagctccagccttctctgccagccagccactccaggctgggcaggggtgggtaccccaaatgctgtctcacctaccatgagcagtgccccattggtagctgggtctagtccgacagtcctgttcgcctctgtagagtaggacagctcctagccgcacttggatggaaatgtcacctgtgtctccttcaagcatctactctgcacgtgactctggggtccagtctccagtgccagcccctgtctagcttcccgccatctctcagccatttctcccatcctgacactgtgttctttaccccactgtctctcctcttatgcctgcaactcttagccccgtaccccaccattgcagtgtctgccctcactccccttctctaagtgccccttactctttccaccttgtctctgggtgcggaggtcccaatctcgtgccctcctgtcttccacaggccatcttccccaactcctgcccccaagtctcagttctcagccctttcccctggctttcctgtcaccagtcctgtccccaaccctatccccttagcttcccccttgccagccccagttcccacccccctcacagcccagtgtccccaggggagaagccatacgtttgcacggtgccaggctgcggaaagcgctttacggagtactcgagcctgtacaaacaccacgtggtgcacacacattgcaagccctacacgtgcagtagctgtggcaagacctaccggcaaacctccaccctggccatgcacaagcgcagcgcacacggggagctggaggccacggaggagagcgagcaggccctgtatgagcagcagcagctggagggtgagggagcagagagtgggaggcagggccacagagcctctccggacatctagcatcgagtaacagtctaggctctcttttcctagccgcctctgctgctgaggaaagccccccacccaaaccaacccacattgcttacctttcggaagtgaaggaagagagcagtgccatcccaacccaagtagccatggtgacggaggaggatgggccccctcaggtggctctgatcactcaggacggtacccagcaggtagaagccctggggatgggtggagcagtctcccaatggcccctgaggtcctcggcctcacctccacccaagcacctgttttgcctttatgggctttagagagctagatctgaggggaccagtgtgtcacccagccctgctcctcccagtgtcctcatctgaatgacatgcctgtgcttaagtggggtcacatcaggtctcgaggatcttgaagtcagaagtctgccagtgttgtggccacagagtaccttgccccttggccatacctcattgtctagtgtgcctctttctactagggtgaagaggaaggcacgctaggtggaggccctgacctgcatgcagggggttacagaggcaaagtagtgggaggtgcaagtgccagagagaggccttgctgctgcttctgtagccgtggccctgcgctgtgccagtgcccaagcccagtgctcccacccctgactccagctcatgtccctcctgtctgcaggtcagcctgtccccagaagacctgcaggccctggggagtgccatcagtgtggtgacacagcacggcagcaccaccctcaccatccccggtcatcatgaagaactagccacatctggcacacacacggtcaccatggtcagcgctgatggcacgcagactcagcccgtatgaccaggcactttccttgttctctgtgtaaccttgtcatgggggtcagagggcattacatgcacagaccaaaccatccaagatttcatgagacaaagacaccataaaagtctccctgccaggcctagtggtatgagcctgtagttgtagctaaggcaggaggaccacaactttaaggtcagtctgggcaaagcaaagtatggggtacagctcagtcatagagctgccatctggcatgtgtgaagtcctaggttcagttcccaagactcaaccacccagactatttatttatttatttattcattatatgtaagtacactgtagctgtcttcagacactccagaagatagcattatagatggttgtgagccaccatgtggttgctgggatttgaactcaggacctttggaagagcagttggtgctcttaaccactgagccatctcaccagaccccaacctcccagactttaaagtcacccctcaaaggccaggtgtggtggtacacacctttaatcccaacactctggaggcagaggcaggaaagcatctgtgagttcaaggccagcctgatctatattataacaatttctaggaccacaaagagagaccatgtctcaaacaacaaacaaatccagtcccctagggctggagagatggctcagcggttaagagcaccgactgctcttctgaaggtcctgagttcaaatcccagcaaccacatggtgcctcacagccatctgtaatgagatctgataccctcttctggggtttctgaagacagctacagtgtacttacatataataaataaataaattttaaaaaacaaaaaaataaaaaaccagtcccctcagcaaccttcatccttaaaagcctttggcaggcagctccaggcagcgtatctgccataggtgtactccctgcgatttggaactaagacagctccgggtcagcctggacagcttactcaaaaacacaaagcatgggaaggactgggtgtagcttggtggctctgaacaccaagtccctaagttcagtccccagtgctgtctctaccaacctgacagcctgcaagaaaatcgtgcaaactaaagagaaaaatgcaatcacaatcacctccacagcgcagtgaccttgtccgtcccgtctgtgctgccccagccatggagcaggtgcaaggtcttctgcttctgtgtctccaggtcacaatcattacctctggggccttggtgactgaggactcaagcgtggcgtctcttcatcaccaacaggtggcgctgttggccacagccaacggaacacacatcgcagtgcaggtgggctgaagactggagggagagggagcctgaaagggagtgggggtggggggcgtgggcagtgagggagagctcaggccccctctgcctatacaaggagactggggagtccttcaccttggggtggctgaggcagcacctgtgcttcacgcttagtctctccacctgggagacagagaagctggagcgaatcctctctaaggcgttttccagccagttgctgttctgtgagccagctgatgtctaacacagagtagcctgtggtctgcccaggacgtgcctaacagggctctttaccagggagttttcctctagtagagccctaataagaaagagcctttaaccccagcacttgggaggcagaggcaggtggatctctgagtttgaggccactcactacagagtgagtttcaggacagccagggctacacagagaaacctgtctcgaaaaccaaaccaaccaagggagtgggtggagcacacaggtctgtggggtctggaagggaggaactgacctctccccctgctgcacctctccacagctggaggaccagcagaccctggaggaggccataagcgtagccactgctgctatgcagcaaggggctgtgaccctggaaaccacagagagcggctgctgagcccaagaggaccagctcccacaccacactggagaaggctccatgctcacaggcagccctgcctccggggcccccagccacagctgaccccaagaagatggccgcataggcctcaggggtgatgaggcaacaggaaaatggcctctagtggaaaggtctgtgggctacacccaagatgagggccaggcagcaggcagtcgacactgagcttggtcaccaggctgccagacacctgcgtccctcccttggcaggatattattcctgctctgtccactcccttcctcagggaggtggtgactaggtggacgaggactggcctccaccctggctgctagtaccaccaggggaaaggccgacagctttcagcccagcgcctcccagcaataaccgtctcctggggctacggtggccaagatgcctagccacttggcaccagggacttcccaccaccacagtcagaattaattcctcaggggcctgtggctggagtgaaggtgcctcttcgcttgtctgtggcagagaggcaagcgagtggcctgtacccagactgctggggactgggtttcatttgttttgtggtttgggtttttaatcctattttgataattttttttcctgctctgggtggtggtggcaaacgggcggatgagtatttaataaaagttgcaagtttccacctgggctcctccatcatttcagtgctggtccctggtggcagggctggccaagctccagcctgctttcctagccctgcgtggcctcagcgcccacccatgcagcaggtggctctccatgggtccaggcaggaagaggccctaagagaggtgagctctgggacccgctggtaggcttttgcccacacctacgccaaacaggacccgagtggctgtgcttcttcctgggctgtggctgaatctggggtaatgcccgggctgccagaattctgggtcttctgccttgccatcattgaacagagcctggacccttccttccctgccaccatcactacatacaacctcaccagggttccagtgacttcttcccagtgctaacatcccggctctgtaacccagttagggggcaggatgtctaagttcatgccgtgagaccccaaagacacagggggaccccgctaaagaacccccaaaaagaacgtcagaaggccagagcagccacagctggacaggttctggcacctcatgaagagcagctataatgctacccacagctgtgtaggaacactgtgggaactgtgggagcctctccctccctcctcgtcatctctctgtatgatgctctcatgagcccccagccccttcctgctgacagagccaggaaatcagggaccaagtgcataagattatcctctcctgggacacctaaggaagccctcatttgctgttgctcagctgggatcttttctctcctcctcctcctcttcctctcctcctcctcttcttcctcctcctcttcctcctcctctcttcctcttccccctctcctcctcttcttcttcctcctcttcctcctcctcctccttcttcctctctctctctctcttcctctctctctctcccctcccttcctccctccccccttctgggcttttttatagtttgtttttgagacagaactgttcttcatagcctaggtggtctcaaactcatcccaaggttttagaactccaagtgaggagcaagtggaggggctgggtatatgcccctgtgagtgagtaggtggatgggtggagcacaactccagaattagcttccactgacttcattgaaatttaatggccaccatgatctgtgtgggcattgcatctgaagaagtggaggctgctgaagagggctctgcccatggcctgccctgcccctgactggatttctgacgtgagccccactgtcaaggtcaccctgtgtgcctaaatacaggctctggtgtcttgaaagccatcaagtacaaagtgggcagtattctgaagtttcttttagagccaaggcccggggagggggaaacagcaaaccaaactgccaaggcaccctgtcgtggagaagcggagaagcagctggctctgtccttcctccgctgggttgcttttgcttgggtagaactctgcactgagcttctgctgggtggctctaaagaaatatcctgtcccgggcctacagggcctacagttttctttctgtccagtctcaggcacccacacagctctgtgaggtaggaacgtactaagagtagactgttggggctaactcatccaatcgcttccacttggtaagcttgactcctgatcctgtgtccctccaagtctggaagggcctgcttcctctctctagagctaccactgggagcctgggaagatcctgaggcaagcaggcttctaaagtgactatctgtgctgagggagccagggcccaaaggagggctccagctctgggagggtcagccctggaagcagagcgtggcgagagcagctggctaggccctggaagcaagagggaacaggcaggtggagctctcgctccgctctgcaccagggcctctctgcggtctgcagccgtttgcatttcctgaaaccggatcttggtgtcagagccgcccctgggccggggcgggcgcctcagccatggccctgcgcaaggagctgctcaagtctatctggtacgccttcactgcactggacgtggagaagagcggcaaggtctccaagtcccaactcaaggtgagtggcatccttggggctcaggggaggctgactcaacgtgccagctcccaccccagagagtcagccacggaagcctttgctactggcagacaccttgccatccagcagccctggccccgggtggagcgctgacggggccacaaaggcagcgtagctcagtggatgctccccagagggctcatgccaccagaagccactgtctagaaccaagtaccctgactggacagacagtagaggtggcatcacgaggttccgagattgagtagccaggccccttcccgggctccttgtgggttccccagcgtcatgcttgggcacgtaccctgctcctccctgtggcttcctcatggctttgaagaaaaacagttagtgcttgcccttggctctgagagcctcctccatttgcaaagcaagctggcgacttgaagcaagcggtaatgtgggccacctatcagcgcaggaacagaacaggttgggagatttatcttataagacctcgggctgagggtgtcggggaagccgggtctgagaaaacctcttccgtgaccacacacacacacacacacacacacacacacactctactcacccccatcatcttaaaaccattaggcctggacagttccaaggagcggaaggagctctctccttcctgggtaggtgtcttcttcccaggggagaatgtaggagaaaccagcagaagtctaggctgctggagccagggagtgttgggccaagtgtcagagtagcctcaaccctgctagggatccagtcactctctgtaaatactttacctggagcaccacaggaggctgtgtctgcctcccactcgcccctcaagatctgggtatttacaatttccactgttcacaaccatgataggaaccctgggaggcagatggcacagaacaggcatggcccacctctgtctcaactccgacattgctgaagctgggtcctatgaacttagaagctctagccagctccatctacccagctgagctggctttctgagcatctaatgactaaggttctactgccccaggaaagagagtccagtaccacctctggttccctagagaggcaaggttagcccttcccatgtctgcccagctctcgtcaccgagttgagttctgcccagaaagaaaaacaggtcatccagacaccaatcctgtagaaactgtgccccccccccccccacacacacaccttcccccaaaccctgtctctttagtactccaccacatggcttcttgctcccaagatactatgttccatctctgtgacttctgacccctctccaggctctctgtgtgccttgtgtgcatagtgtgcagcccttggtgtcatcagttagaaaggcctcccaattagagcccccccccccgttagcttctgaccagccccttcctgccccactcccactccccaatgcccacaggttgggaatttctggggaagaacctctgagcgcatatacccttaaactgtgctcctccctgctcgaatcgagccctcttgtagtgacatctctggccagaaacagtaaatgtcactcacatctgcctcacaggaaacctgtccactctcaaactaacactgagagttttggggccatgtgaatgagaggcagaaatgtcaggacccttgcatgtgagggaagggtcccccccccccaacctgggccaatgtggtggatgctgggccgggagggaagtaatgacattgctggaggtggggagagtcagagaggaggaatggagaagtggtcagaaggtggaggaagaagcagaggacagagataggctagcagggtacacccagtctcctgtggatgtagggggtgagggctcgggcttagctggttttaagaatatggttcacagccttggtggcctctgatggggacaggcaggaaactgtataacccccccaaccccagatcacactgagtctgagttgcctcttctcccctccgannnnnnnnnnnnnnnnnnnnnnnnnnnnnnnnnnnnnnnnnnnnnnnnnnnnnnnnnnnnnnnnnnnnnnnnnnnnnnnnnnnnnnnnnnnnnnnnnnnnnnnnnnnnnnnnnnnnnnnnnnnnnnnnnnnnnnnnnnnnnnnnnnnnnnnnnnnnnnnnnnnnnnnnnnnnnnnnnnnnnnnnnnnnnnnnnnnnnnnnnnnnnnnnnnnnnnnnnnnnnnnnnnnnnnnnnnnnnnnnnnnnnnnnnnnnnnnnnnnnnnnnnnnnnnnnnnnnnnnnnnnnnnnnnnnnnnnnnnnnnnnnnnnnnnnnnnnnnnnnnnnnnnnnnnnnnnnnnnnnnnnnnnnnnnnnnnnnnnnnnnnnnnnnnnnnnnnnnnnnnnnnnnnnnnnnnnnnnnnnnnnnnnnnnnnnnnnnnnnnnnnnnnnnnnnnnnnnnnnnnnnnnnnnnnnnnnnnnnnnnnnnnnnnnnnnnnnnnnnnnnnnnnnnnnnnnnnnnnnnnnnnnnnnnnnnnnnnnnnnnnnnnnnnnnnnnnnnnnnnnnnnnnnnnnnnnnnnnnnnnnnnnnnnnnnnnnnnnnnnnnnnnnnnnnnnnnnnnnnnnnnnnnnnnnnnnnnnnnnnnnnnnnnnnnnnnnnnnnnnnnnnnnnnnnnnnnnnnnnnnnnnnnnnnnnnnnnnnnnnnnnnnnnnnnnnnnnnnnnnnnnnnnnnnnnnnnnnnnnnnnnnnnnnnnnnnnnnnnnnnnnnnnnnnnnnnnnnnnnnnnnnnnnnnnnnnnnnnnnnnnnnnnnnnnnnnnnnnnnnnnnnnnnnnnnnnnnnnnnnnnnnnnnnnnnnnnnnnnnnnnnnnnnnnnnnnnnnnnnnnnnnnnnnnnnnnnnnnnnnnnnnnnnnnnnnnnnnnnnnnnnnnnnnnnnnnnnnnnnnnnnnnnnnnnnnnnnnnnnnnnnnnnnnnnnnnnnnnnnnnnnnnnnnnnnnnnnnnnnnnnnnnnnnnnnnnnnnnnnnnnnnnnnnnnnnnnnnnnnnnnnnnnnnnnnnnnnnnnnnnnnnnnnnnnnnnnnnnnnnnnnnnnnnnnnnnnnnnnnnnnnnnnnnnnnnnnnnnnnnnnnnnnnnnnnnnnnnnnnnnnnnnnnnnnnnnnnnnnnnnnnnnnnnnnnnnnnnnnnnnnnnnnnnnnnnnnnnnnnnnnnnnnnnnnnnnnnnnnnnnnnnnnnnnnnnnnnnnnnnnnnnnnnnnnnnnnnnnnnnnnnnnnnnnnnnnnnnnnnnnnnnnnnnnnnnnnnnnnnnnnnnnnnnnnnnnnnnnnnnnnnnnnnnnnnnntcggtcactccactgtcaggggactaagcacctgtgcccaccatgccctggctgcatcttttaagataatgactcgaaacactcatgcagaggtcacacctatgatcccagcacttggggggagccaggggggtgcgttgctgagtcaggaggattgctgagaagttggggccagcctgagctacagtgtaagatcctatctcaaaaaaaagaacaaaccctgtttaggagagagattattcatgctttgtgaggtcactgcctgctgcttccatggggttcccactttgtgttcatctccccagcccctgttagacaggggtccaggatctgaactgggcactgcagagccacaacttccaatcttgtggtcagtgtagacatggcagctaatttctcccaggtccctccaggagagcatcacccacacccacacaggaaggagcaaacacatagaaccttctacgcccagggctgcccactttgaagtcagggaccgagggactccagatgacagcgtatgaaaaatacagacacctagaccccacccccggaaactgtgagtcagggaggggtaggtctttcagtttcacctgctccagtcaagacccagagggggcctcggagctagaccctggccatgtcacttcctcccaaagcctccatttccttacctgtgaagctcagataatgagctccctacctcctggcccagggttgattgagatcttgcagtgagctcctgcccactgctaccccacccctgccgtttcctttcctgtctggtcccacccctcaccccacctcaggagtaggaaagtctagcagtctgaggtcagcctctctgtgcagagggccccaagtgtctagagccccaagtcccacctcatccagacaactgacagccccggtcctggactcggcaaagtcagtcacaaaaggatgaggaacctgtaatgttaggaggatgcgagtgaacacccaagggagggaacagacctggggatgcatctgagctgatggaggccttgcctaagtgcatccacgtgtgtcccatcccaggattgggttaatccggcactgcctaaacggggcatggcacagaacatgattggatggaagaggcaagaggatcaggagttcaaggtcatacagaaggagtctgaggcgagcccagactagctgagagcttgcctcgagaaacaaaacaggaatggactggagagatggctcagtggttaagagtaaagaacccgatgtcctttggtgttgaacagcttcctcgtaagtccagttctataaacaagtaagatgatattgacctttaacctcagcactagaacactgaggtagaaagactggaaggccagcttaggctacagagtggcatcctgtctcaaatgcccctcctcgattttctttctgtcagatttaaacaacagaccggctggcaggcactcagcaggttaacacatctgctgccaagccttacggcccgagtcgcatcctgggcaccaccctcaccccccaatccttgttgcaagagaactgactccccataagttgtcctctgagctccacacaagagctgctaaaataatagatttggaaaacaaagtgcacccttaacagctatcattactccgcctggttattaagttgtgctctgaaatgatcttgggctgccctgtttgtgaatttctgggtgtcacccattcagaacttgtcagccaaaccctttccccagagttcagttgatgtcctctctggatctgtgttgactctcttagtgactcataagagctgtgagctgtttgcccctcccatcccccactcctcccaaccccaccacctcaaataagtaaatgttaaaacaaacaccttagaggtgactctagaagcactagctgcttctccagaggactcaaggtctggctcacaacagtctgtaactgcagttccaggcgatctgacgccctcttctggcccgtgcaggcactgcatgcacatgatgcacaggcatatatgcaggcaaaaataaccatacatttaaaatacaattttaatcgtttttttttagattatgtttatttaagacctaggaatgactaagtagttaagagctcatattctcttgaagaagacctgactgaggttggcttccagcgcccacatcagatagatggctcacagtgtatataattccagctccaggaagtctgctgtccttctctggcctctgagggtacctacggttatccgaacatacccacacataagtgcatgcgcgtgcatgtgtgcacacacacacacagagacatcacacaaaaagtcaaataaaccttcatagaatggaaaaaaaaagaattgaattctgggtcaaaggtcacatccgatttaaaagattatatttttgttgttgttgttgttggtggtggtggtggtgatgtgtgtgtgtgtgtgtgtgtgtgtgtgtgtgtgtgcatttatgagtgtgggtaccttcagaggccagatgaggatccagatgtcctaaggtacaggcagttgtgaactgcctgatacagatgtcgggaactgagcttaggttctgtggaagagcagccagtgctcctagccactgagccacctctgccgcccacacccacttttaaattgagagattcctgaactccatgaagatgtctaatttagccagtgatgatggtagcacactgctgtattctcagcattgggatgtaaacaggaggaccttgagatcaaggttatatttggttaattgtgagtttaaggtcagccttggctacatatacataactcacaccctggtggtaggttattcaagctcccatttcctcagtatttgctgataccgtcttttgcatttttgacaaataggtttttaaaaaagcaaaccactttccacactgggcaggaactcacattcattgcgtgcagagctgagcctggctctgcatctctgtcatctcctgccttatcatccacagcagctatagcccattttattgaaaacaaaaccaaggctcagagcgtgaagggctttatccaagatcacacatgccttcccatgttccctgtcctcactagagggtagccatttggctggggctttgcaggaagcatcctcaaataggcactttgagaagagacacagcagatgagagtaagacctttttttttttttttaaagatttatttatttatttattacatgtaagtacactgtagctgtcttcagacactccagaagagggagtcagatctcattacggatggttgtgagccaccatgtggttgctgggatttgaacttcggaccttcggaagagcagtcgggtgctcttacccactgagccatctcaccagccccaacttttttttttaatgatttatttattatacgtaagtaaactgtagctgtcttcagacacacaccagaagagggcattagatctcattacaaatggttgtgagccaccatgtggttgctgggatttgaactcaggacctctggaagagcagtcagtgctcttaaccactgagccgtctctccagcaccgtaagtaagactcttggatgattactgtcattttaaatagtctgtgggccacttggcggtggtgccctttgatcccagtactctggaggcagaggcaggtggatctttgtgagttcaaggccagcctggtctacagagttccaggacagccaaggctacacagaggaaaccctgtctcaaaaacaaaacaaagaataataatcatggaaagaaaaaagactgtgggtgccctgccctgttttctggaggcagtcgctggacttttaaatgttagaccttgagctgatggcaccccttaaactaaccacaaatgcattagctagaacttgcctggatctaagtaacaaggataactcagatgggttaagggaagggatatttactagctctcagccagaattccaggaacagggctgggagaacagcttagtgatagaacacttacctatttgcaaggtcctgggtccatcactagcatagacacatacacacacacacacactcacacacacacacacacacaccactcacatacatactcatgtacacatatacacatgcacacacacatacacacttgcacatatgcatacatatacacactcatgcacacactcatgcacacaatcatacacacacattcacacatacacatttgcatgttcacacccacacacaaattatttatttggttttttttggagtgtctcatgtagcctaggctagcctcaactcctgatccttcttcctcccaaagcgccaggactacatgtctgctcaccacgttcgtgacgcctttaccttctctttcctttaaataaaacagcaatttggactggaaaggtgacccagtgtgtaacgtgtttcctgacaagcctgacatggcggaaggaaaagactgggtcctccaagttgtcctctgatctccatatctacagcacggcttaagcataaggaataaatgcaataagaaattttaaatcactttatacagtggctgtaacatggggagcaacagggatgcaatactttttctttgagacggggtctcactgtgtatccttgaactgtccttgaactctctatgtagaccaggatggcctagaactcagagaccctcctgcctctgcctcctgagtatagggattaaaggcatatgctaccatatcccacccaataagtgactattttttaacagtattttaaccacagtgttgatgattactcattgtaacagaatttccccaaagctccttcccactcccctctttttaccaaagtttctggttcaaaccagccctttgtcttagcaccatggatctcctaagccagtgcccaccccaccccaacccccacacgccatcactgccacacagctaccatctctcctgtttctccatctcaggggccatttctcacaggcattctctgaaccttcccttgctcccttccctattcagaggcctctcctctcatcacattagcctgggcgcacatggcagcctgcgtctttggttaaaagtgatgaagtcgagggtcttgccctgtaatggcccactgcctccctgcagatagcctagagctcatagggctctgaaatcttaccactcccgggctcctaaggtgtaacaaaataaccgggaagagtcctcccgggtctgaatccctgctctgccagctgagtgggtcctcaaggtttctcctctgtcacctggggacagaggttgttgctatgacagtgatgtgaatgagggacccaagagtctgctcttgtgtgtcaaataggacggtgcccacagagaactcagtcgaggcagggcagggatgaaagagcaaacaagatggactcatagtcttttggccaaggtctgatccggatgcagaaaagcaacctgttgctctgtccaaggtgctgtcccacaacctgtacactgtcctgaacatcccccatgaccccgtggccctggaggagcacttccgggatgacgatgatggcccggtgtccagtcaaggttacatgccctacctcaacaagtacatcctagacaaggtgaggagctcgtggggagcaaccgcttcccacccccccccagcaccctaacaccttgccttctccccaaacactccactcccctggtaaactcccatttctgcccatgctctctgtccctgctcctcaatctgcagttgccatccaaccacttgttccctattgtctgtcatctctcttagctcccgcgtctccctgccgaagcccacactaatttccaccctactcttctcggctgtctcagtttttgagggttctcctcggctgtgccgtctcctgggcttcccttcctttctcccttgggctgagaaactagtttcattcttgccatggaaattagagtgtgaaagtaacattggagtgtctgagccaactttgagttcagtcttgggcttggcgggatggggaggtggggtctgtagatgaacccacgaaggtaggctggagctgcggtaggaggaggatgaagcagcgggctgatgcaagcctcaccgcaggtggaggagggagctttcgttaaggagcacttcgatgagttgtgctggaccctgactgccaagaagaactacagggcagatggcatcgggagcagcccactctctaatcaggatgctttccgtctatggtgcctcttcaacttcctgtctgaggacaagtacccgctgatcatggttcccgatgaggtaagggtgacatcagaaccagacggtggagtcactgagggccaagcccctggcaaagcctcaaaggaagacagagtatcattgggcgttcccagatcccctaacttcacggggcaccccatttccggggaggggtgcggggaggggggactctgcaagttctcagaggaagaaaatgagccacagatgtttatagtctgtggctgcatagacgaagcaccctgctgagcatttaaagaccgttcagatcctgtcgggattcggcggaacagcagggttaggcgcagcggtggtactcaaggaaaggcctttgttcaagcaaagggaagcggtgtgcagacaggaagtaactccctggttactcaaggtgggcaaccgaatctggcctttgccccagagagagtttctttccttttttttttttttttaaagtggagagccaaatagactcaaaaaaaaaaaaaaaagcaggcagggcatgatgggagtcgggggaggggaggccaggaacctgggtcctgcctccttagttctgggggaactctgagatctgaactaacgccccaggggagacccagtggtcccccagagtgtcacccgtaaagaaagtttcccaacactgctggagccagtgtgggcactctcagcaggttcttgtcagttgggacagagcagcccctcagcgagtaggaaagcccataccgctgtgagaacaaactgacacaggatgtaccccaaccactacttcctgttcctctaccatggctttcctgtgtcggccctgcttacccccaatctttgtcccactgatctcccacaagagaaggagctcaagtgctgcagattggctttggagtcagaaatccaaatggagtcctggctagcccccccccccccacacacacacacacatgctgtgggacttaaggaagtcacttcccacactgagccttggttttcatcatatgcaaagctgagggcagtgggtaggttaggagggtgttttctttaggaggctgtattctttttggtctctgtgtaacctggctatcctagaactcattctgtagaacagactggcattgaactcacagagatcctcctgcctctgcctcctgggtgctgggattaaaggtatgggccaccaccaccactaccaccaccactaccaccaccaccacactggccaggtaggagggttcttagaccatttctgatgctgtgatttgccactctgactggcctctcaagtcccatctgacccaatactttattttattttatgtatgtatgtatgtataccaggcaatacctcaaacttacagagatctagaccaggtcatgaaggcacacacttgggaggcagaggtaggtagatctctgagtttgaggccagcctggtctacaaagtgagcttcaggacagccagaattatgcagagaaaccttgtgttgaaaacccaaaagaaaaccccacaaaaaaccctcagagagatctgcccacctctgtgtcccaagcaagtgcagggattaaaggcatgagccaccaagcccaacatgaccccacttttagtttatagcagaaaaagtagtggtcttaagacagggaaggcgggggctggtgagatggctcagcggttaagagcgctgactgctcttcctaaggtcctgagttcaagtcccagcaaccacatggtggcttacaaccatctgtaatgagatctaacgccctcttctggagtgtctgaaaacagctacagtgtacttacatataataaataaataaataaataaataaataaataaataaatatttaaaaaaaaaaaagacagggaaggcggaggaggtctgggctgtgggacccctggaaaaacctctctcctggtttccacctgtgtatggcctcccccttgccctggagtcgctgttgaggtcacctggcctccctcttgctcccaggtagagtatctgctgaagaagctccttggcagcctgagtttggagatgggcctgggcgagctggaggagctgctggcccaggacgcccagtcagcccagaccgccgtggggctcagcgtctggcagtttctggaactcttcaactcaggccgctgccttcggggtgtggggcgcgactccctcagcatggccatccaagaagtctaccaggagctcatccaagacgtcctgaagcaggtcaggcaagccgggagccctggaggggacccttgggagccggtggggtgatggagacctaggaggcctcttgctgacctcgcctccggccacagggctatctgtggaagcgagggcacctgcggaggaactgggccgagcgctggttccagctgcaacccagcagcctctgctactttgggagtgaggaatgcaaggagaaacgaggcaccattcccctggatgctcactgctgtgtggaggtgaggtcacagagtgcggacagggggttgggagcaaggacggtggaaaggggaaagccgccatgatggttccgcttagttaaattagtgcatcgcaaacccacctggctacctccaggccgctcatgcccggtaggcacttttattttttcctggtcaaacgcgggggacctcctgcatgacaaggcagttgttccatcataccagcccagtgacacaacttaaaaaagactaaaaccaccgaccagatgcagaagccactggtagattattagacgtcattagagatttcagagggcctgactcagacctaacacttcctgacaaatctttccagtccctttttcctttccctttgacacagggtttcttttttcttttcttcttctttttttttttttttttggttttttggtttttttttttgttgttgttgtttttttgagacaggacttctctgtgtagtcctggctgtcctggaactcactctgtagaccaggctggcctcgaactcagaaatccgcctgcctctgcctcccaagtggtgggattaaaagcgtgcgccaccactgcccagcaacacagggtttcttgtcaacttacatagtcaacactgaccttcaattcccaatgcctttgcttctaccgcttaaatgctgggatcacgcgagtgtgtgtgtgtgtatacatgttcctgtgggtatacatgcacatatatatggaaaccaaactttaaactagggtgtcattcctcaagagatacctgcttggtttgttccttttctctttgagtgtgtgcatatgcatgtgtgtgcctgtgtgtgtctgtgtcccacacacatatgcatatggaggtcagaagtcatcccctgatgtaattccttcaggagccatttaccttatttttttgagatagaatctctcacactgggacacggggttcaccgatttagataggccgataggccagcgaaaccctgggactctcttctctctacctgccaacactgggattatagcaggcctcatcatgcctgcctgtttccttgatgctgggctaggactcaggtgtgcattcttataccacaagcactttccaattgaactaccacccacctcagcaacctcagtttctttggttttgagacagagtctctcactggtgcggatcttgccgtgtaagttaggctggtggccatcacgttctggcatctgcctgtctccacttcctcagtgctagtacaaaagcatgtacagtcatacccagcttcgatgacatcacacccggctctgatgacatcacacccagcttcgatgacatcacacccggctctgatgacgtcacacccggctctgatgacgtcacacccagctttggacacagactctagggactgatccttttatagctgagaatttcatacaacttgtcttgatcatactcacctcccattccctaactcttcctcggctcacccctcctttttccctacccaactttgtatctttttttttttttttttgaatctttcaggataatttgtgtcttaccaagtgctacactcttcctctcccagcaactaacaatttgccagtagcaccactgcccaacccccccgtcctttctgggatttggtctggcatgagcttgcacaggctttgtgtatgctgtcaaatatgtgtgtgctcattcgtgcatctgccctgccaggtccagaagataatggttccttgcagtcaccagctgcctcgggctcttacggtttttctactcccttctgaagtgatccctgaaccttgggagggagtttgcagtttatcttttccgtttcgggctgagcattctgcaccctggccaattgtggatcagtgtgttaaacaccatctactgacgacaggagcttcccagcctagggaatgcctatgagacattaggagtcagtttcatacatacatttagcagcacgatcattttgggctctcctctggggcttatgacctgtgtaggtgtgaagtgtagattttgctaccccgcctaagctctgggaatggccaagcaaccagcccccacccagcttcccttgaacccagggataaagacacagacacacacgttgttcattttcaacttgccttcttggcactattcatgggcattattaaactcctatggctagcatgcccttatcaatactcttagctctgcacctcccacctgccctaaactttagttgctcagtacatctagtccctgctaaacacccctgaccccctgcatgtaggagtggcctgtgtggccactccgtttagaggtctcacatggctggtcaacttttttccatctgaagcatgacgaactctcctctccttccttggatctgtctgcttgcctccagggacccggaggtcccgcctatcccttctgcccagcaattggctcatggcttctttactgacagatcaagaaccaattggagctggggagccgggcagtggtggcgcacgcctttaatcccagcacttgggaggcagaggcaggcggatttctgagttcgaggccagcctggtctacaaagtgagttagttccaggacagccagggctacacagagaaaccctgtctcgaaaaaaccaaaagaaaaaaaaattattaagggctcctcatactccagagactggggcagaggagacttttgaggtaggaggccaacctgggctacacaacaaaaccttgtctcaagagaaaatagttccccgaggcattatccctttctgttgcacaaagaaacaggtgttgggtaaggctccagatatctcagagccaattacgttctctatgaagtaaggtccgacaggaatatatgactgtagataaatgttgtatggaaaacactagtgcagagctgggcacgttgtggtacacgcctttaatcccagcacttgggaggcagagggagagtttgaagccagcctggtctatagagctagtctaggacagtcagagctacacaaagaaaccctgcctcagagagagagagagagagagagagagagagagagagagagagagagagagaacacaagagaacactagggcagaagagcaaggatgtcaaacacaccctgcattatcagtatctccaaacccttgaagaacgagtgccatttaagagaccaggtggaaatcagcagttgtaggtgctgagtgaggctccaggcacatgttcaagcatgtactatgtactaaaccttgtggagagataccaagaataaagtggctcgcacgcaccccgtaactaacgatccaccccagaccatgcatactcctggcagggtaggaacggtcccagagaagatggtcagccaagagaaagaggaggaagctggagctggggtactactggggcagatgtggctcctatgtcagcgaagtcacttggcctgggccatcctgtaggtgcttccggaccgcgaaggaaagcgctgcatgttttgtgtgaagactgccagccgcacctatgagatgagcgcctcagacacccgccagcgccaggagtggacggccggtgagtgccggcctgggtctaactgggcctgttcaccggagtgacctttggggcccctttgcggtggtgactagaccagggctgactccgtccggctctgcccttagccatccagactgcgatccggctgcaggcggaggggaagacgtcgctgcacaaggacctgaaacagaagcggcgggagcagcgggaacagcgcgagcgacgccgggcagccaaggaggaggagctgctgcgactgcagcagctgcaggaggagaaggagaggaagctgcaagaactggagctgctgcaggaggctcagcggcaggccgagcggctgctgcaggaagaggaggagcgccgccgtagccagcacaaggagctgcagcaggctctggagggccagctgcgggaggcggagcaggtgagactggcccagagggcggggccggggaagggttggggcggggttatgaccggggcgtgacaggaagaagagcagggcgtagtccatggtctggaggatgctatgggcggggcctagatagggtggagcccattggctgaaggatggacctaaggtagagactgaaagatgctgtgggcggggcctgaggggcccttaggggaataggttggagtagagcctggatgctttgggcatggcctaacgaatgttagggtagggccggaacaaggttagggctagggaaaacccctggtagaatgagacctggttcagaattcttttctggaggcaggacttgggccgaggaagctgcttaaggcttcttgattgcaaataatttggaatgaaatcaatctagacttgaactaaattttaacaaaaccagtttggggaccataagacgggatgcatgtgaagggcagagtagatgcacagaagcaattgactttaaattttaaattgagaaaacgcaattctagagctggctcaaaggataaaggtgcttgccacacatacctagcgtcctgaattccgttcctggaaccccagaaagatgggcagagggaaccggctccacaacgttgtcctctgaccgccacaggcatgctgtggcatgtgtgcccattacacctccgccttaagagctgtatgagctcagacatgcactaagtctctccgtatcagtaactagagctctgtatatggaaatgggacgaggattctgtgaaggaatagatgtaaggagtttaataaagccaggcaggtgctacttagtgagtttgaggccaacctgcactacctgagatcctgtctcaaagaacaaagtaggtctaaaatgatagcctcacagttaagaccactggctgctttttcagaggaccaagcttgagcttgtgcacccacatgggagctcatagccagccagcagatcgcacaccctcttcttgcctctgcgagtagtgttctcatgtggtgcacagacatatgcagccaaaacacccatgcatatgaactaataaaactataacaacaacaacctgggtggtggtggcacacgcttttattcccagcacttgggaggcagaggcaggagaatctctgtgaggtcgaggtcagcctcagagaaacttggtctcagaagaaaaataaaagcgttcaataacttgtggttattgtaataattgcagttcctggcacccgccataatgatattataattgttagggtaggagctaggaagggattaccttcgtttaatatgctggtttattgtaatataacgtattatgatgtttaattacatgtaattataaccggtgttgttttgtgtgaggctggatagcaaacatacagccatgggcacatcaggtgagccctctgctgctgagctacagccccagcaagcgtctaattattctttctaaggtcagtgcaaaaacaataggaggattcagggtcttaaacaggtcagatcaggaaaccccaactaaagaccctccatacacagagccaggaagagttagggttggggggttggggagttggctggggagggggcagtagcctgtctttctcctccggtgtcccactgattcgctctttgctccccacaggcccgggcctctatgcaggctgagatggagctgaagaaggaagaggcggcccggcaacggcagcgcatcgctgaactggaggagatgcaggagcggctgcaggaagctctgcaactagaggtgaaagctaggcgggatgaggaggccgtgcgcctcgcccagaccaggtaggcacggtggccagggaacctttcctgccagcgcccgcgcggaccctccctccccggctctgagatgtccctgtgcactctggcaggctgctggaggaggaggaggagaagctgaagcagctgatgcatctgaaggaggagcaagagcgctacatcgagcgagcgcagcaggagaagcaggagctccagcaggagatggcgctgcagagccgttccctgcagcacgcccagcagcagctggaggaagtgcggcagaaccggcagagggcagacgaggacgtggaggtgagacaaggccgggaaccgggagaagctgggggagccagtgtgtcactgagccggaccccagagccaagctacctgtctgccaactcgcattatcatcagctggctgtgccatcgcctacagattgcctaacctctctgtctgaagtctcttatctgtgagaggaagcagataccacgttaccactacagaacaagcttagtttaagcatggtatttagtatgtaaatgctgaacacacctgtggctgtgtttgccaatagtattattaacctgggcaggattccccacctcctagcctccaaaacactccccggagcttgaatgcctgtagaaaaggttctaggttgttgttgttgttgttttggttttagatttgtttcttttttaatctcttttaaaacttattaaaatgtatgtgtatgtgtgctttgtctgcatgaatgtctgtgtactacgtgtgaacagtgtgcacagaggccagcaggtgttagttattgcatcccctgagtctggagttacagttgtaagctactatatggtgctgatagagttcaaccctggtcttttaaaagcaatcagtacttttttttttttttttggtttttcgagacagggtttctctgtatagccctggctgtcctggagctcactttgtagaccaggctggcctcaaactcagaaatccgcctgcctctgcctcccgagtgctggaattaaaggcacgcccggctttaatcttttttttttttttttttttttttttttttggttgcaatcagtgctttttactccagcccaatgatgtgttttttcttaaagtaatttaaaaatgttttatttattttatgtatgactgctctgtctgcatgcccacctgcatgccagaagaaggcatcagatcccattacagatggttgtgatccaatgtgcttgctgggaattgaactcaggacctcttgaagagcagacagtgctcttaaccactgagccacctctccaaccccccaatgatgtcagtcattcatatatatatacacacacacatatacattggttgagttctaggccagcctgatctttagaatgagtttaggacagacagttacataccctacctatttttttttttttttaatttttaaccggggctgaagtggtagcttagtggttaagagtacatgctgctcttccagaggactggagttcagttcccagcatccacaggctacaaggctacaggcaggatctcctgtaacccacgctggcctttaactcattatgtagcccaggctttgacctccctctcctctacatcccaagtactagagttacaggcatggcatgcacctcaccaccatgcccagccttacaggacttcctggggggtaggggtgggggatgggtagctgtgatcagattctcagggcctctgaagatgaccaggccagcagcctccaccaccacggatggcagttctgacccactcccaccgccttgccccataggctgcccagaggaagttgcgccaggccagcaccaacgtgaaacactggaatgtccagatgaacaggctcatgcatccgatcgagccaggaggtgagccttccctggcttgggaggaaggaggggaggctgccagatcacccggatcatgaaggaggtggaactgaaggtcaaaggtttcccttctcccagagcagaggcacaaccctcacctctcccattccgactcacattttccctttctccctctcttctctctgccagataagcgacccaccaccagcagctccttcacgggcttccagccccctccgcttgcccgccgggactcctctctaaagcgcctgacccgctggggttcccaaggtaacagaaccctctcagtcaatagcagcgaacagaagtccctcaatggtggagatgagactcccatcctagctttggcctctcaggaagaaaaactggatccagcaccagggaattagctccgaccacccccttgttcttccgatgctgtgtctacggacttggccacagcaggcctgtgggtgattcctggtgctaccacctgccgaccaaaagccgatcaaggattgaacttggttgccattctcagcaggccgagaccgtggaggctgtttgagatattaatacttgagaatatggttgtgtgcttcagtctcaaggatctgggaccagaactgggaaagaaaaggaatgaccaagacaagatcatacgcccctccctccagaccaagttatggagacatacttccaaataaaactgctcacaactgcccactgctcctgcccttccctccctcccttcctttatccatccctccctccaaccacctccccatccctccctcgagttcaagttctaggtcccagggacagcaggtgtggcaaagtggttaggaacacggactgtgggctgaactaggctctgccattttctcacgggtgaacttcacgcccccccatacacacattggtctatagagaggatcataatccctgatgtagcaggcctgagtggagcgtcgtcattactagtatctgaaagtgtttattgagcatctactgtctacctggagtccacccatgttacgtcattcgcaaagaacccctaagtgctggacggctgttatcacagtaacagaggtccaggcaggttgggtaacttgtccaaagccttccaaacttttcccattttctctgactagtggtccttgttctcctagacaagacttctgagattctagattccatttccatacccctcatcccaagcctgggacatccactggggtccccgttcattataccctgtacttctctctagaatgggttacgtctggattgtccccttgcgagtgtgttaggtgccagttcctccacgagggcactatgtctgggagactgttgagcctcctgggaagtggtcacactatgctctctactgctgtccttcctggatgtaagcgatctctgactgagctacatcaccgtgcctaccgcatcatgacagagcgagccctcagaaacctaagccaaaagaagtcttccctcccttgggttgtttgtgtcagacactgtcacagtgacactgaatgactaatacaaggtcctttcccatcctcatagctgcagagtgtgagccattaattgactcctccactcggccccacgtttagtaagtcactacccctgtggtgctatgaccagaggccactgccttctaacctgtcagctcctagttaactaagagcttcccggactcccttctaattctgctgcccggatgggtgtttggaaatcctgcccagcccttgccgctgtccaaaagactttgtttggattaagacaggctctcactttatagccccgatggtccccaactgaggctcctgcctaagtctttcaagttctggggatactggtagacacaatcaggcttagctacatccaagagttaatttaattatattctctatattctctctgtgtgtctgtccgtccatccgtctgtctgtgtgtctgtctgtatgcacacacacacacgcacacgtgcgcacacacacactcacatcatggtgagtgtgtagaggtcagaggacaactttcaggaaacagttctccttctaccatgtggtcccaggtcatcaaacttggcagctggtgcctttacctgttgagccaccaccctggacctgcagaatgacttttgatagtcacgcttacttgcccctgtgccctgtgggacacgaaggccatagtcatcaagccaagaagacctgctacagttctgctgcaggggcacagcctcagcttcttcctcttgctcttctaggtctcactatgcgctcctttctcctcatttctaaatgttggaggtccttgaagacaaggacatgaattcctcaacgctgtccccaatgcctggcacagagcttgctcctaagaaaactgtgtaccaaacatgtcttgaatgagtgggatgtgtggctgggtgtggcacagttagaaagtgaggacattgctgagactggagatcaagtccgtccagcatcaaacccaatgattccttaccacgggccaggggtttgccgtgagctattatctgggaagggttccctgctttcctggagtttgcttgctatctcatcgcaaaggtcacagccttgcaagtgcacccgatgcactttcaaggaagtttgtgacatttaaagtgtcacgaaactcctgctagcgctagcgtgagggcacagagctgaggggtaggaggtgaagtccgaactccatgtgctatgggataactaagggaagcaggtcccgccccacactaggagtggaggctgcccaggcttgcctggtctgctgtgtttctgcagtgctgatgatggcagctgatggggtggtgggtctggatttggacctgggaggagttaggggaaggagtgagcatgactatggtcaaaatacaaaatgggcaagtgtgaaattctcaaaaccaacattaagaatctagcagaggagtagagttcttgcttagcatgaagcccttgttccatactcagagccacataaactgggtctagaggattccagcatgtgggaagtgcaggcaggaaggtcaggagttcaagaccagctcgagaccctccaccagagctctgccagacacaaaatggcagaaatctctgacttccccaggccattttttactacagtcttggaggacaagggaagtgatatctaaaaacttaatacaaattcatttcaaaagcaatagaagggagctagggagagagcaggaaagttaagcgcctctgctgttcacgcagagcagccagcgttcagatcccgacacacagggaaaagcagggtgtggtcctgtgaattcctgtaattgcagaaccaggatagcccaggcttgatggctgacagcctatcccaccaaaccagaaccgctcgtgcatgcatcaggagaccaggcctcaaaggaaaaccgtggaaacctatccttggaagacacacagtacccttctctgtcctccaagtgcacacgcgcacgtgcgcacgcgcacacacacacacacagacacacacactcgaaaacaaagcagaaaaaaagtggtgtggggttctccaatccagcgagctaaggatgcactgtaaggagtgccagaccgggcagaggtgacctttaatggcggtgtggaggagggaggtgcctgctgactttcctgccagccaagttttgttcattctaggatgatgaaaccagccagtgacagattgccttctggctacatactctctgtggtatatgatgagttggggtgacaggcaagcccaggtacagagttcttgtcttgtctggtccctgacatccagcgacagaaatctcaagtgggagaaaagttcttttaaaatttgttttctatttggcttcacaaggcctataagcacaggctggcccaaaactttctccattgctaaaaatgacctcaaacgggtcctctacctcctgagtgctggagttagagtgccatcatgccttccagatctttcttttttcttgtgtgggtgtatatgaaagtgcacatgcggtgtgtagagattggaagataaccttcaggaggcagtcccagggactgaactcaagtcttcaggcttggagacaaagcgatgacccgttgagccattgaactagccaccagttaaaaaattgggggtgctgaagagatgcttcagtggtgaagatcgcgcttgctactcttgaagaggctcgcttcccagcatctacatggaagttctccattgtaactccacttccaggggatccaacgccttcttccagactctgcaggcactgaacgcacatggtgcagagacagacatgcagacaaaacactctgacatataaaaatagatattttgtaaaacgtatgcgtctgtattttcattcccaagtctcccaccatatgcctctcccaagcgcctctgaaaattacagtttgcctctattccttcccccaccgcccttagctttgcttcttgcttcaaaccacacaagtctatgcctagtttcttctcaggaagagtgaggaggttgtattagatgacctccaccttctttccgcgctttaaagctttaaatatcgtttcgtgaggcttgctttgaccagccctaacttctccccagcgctttcctcagctgctgctcccacgtctgactgcagagggcgctgcagacgcgccagggcagctgtgcagtgggcggagcgatggctgtcaaaggagtggctccaggcggcgcggcgattggctactgctatggcggaagggggcgggggcgagtgcttagttgtgggggagggagccagcggcgcggtgacatcacggggctgggggcggcgccggggctgggagcgtgtgacgccgcaggccgcggcggacctggggattaatgggaaaagttttggcaggagctgggggattctgcggagcctgcgggacggcggcagcggcgcgagaggcggccgggacaggtccgtgcggatcgggagaggccagcgcggcccgggctgaggtggatggtggggtcaggggctccgagagccgctttccgcgcctctgcggctcgtctatgctcggcttgcgcgctgaggagccaccgctggggtctccaccgcagggacccctgtggttgctcggagccggcctccctccctcctcccacccaccctgatccctctaaagccccgtggcttcatctcctctcaattccaaagaaccccatgtcacctcccttctgaccccctttctgagcgcctcccttgctgtcccgctacccaggccctccttggagatccttcctgcctccctcgatagccttccatccttgccctgtcggtcagtgctctcctcctctctgacccgttttcgggttgccctatccctccccatcttctttaggatgttgtgagccagtccggtttatccgagccccttctatcctggctaccggcagaggccccacttaggctcagctctcatctcctgtccttttcacctcctgtcacccgactgcctcgcttctagttttttttttttttttttttatgcctctgcttgaggagaacccagaggtgcacgataggcttccgtttcaccttcagttgagctgggagtggggtgttgagcgccagcttgaccagatttgttcgggtcacaggtttcactgggtgttgtattgggagggatggccagttggtaggccctcgtaatctcagctttataatacttcccctttatgagtctgttgacttccaggaacccttgggggagacggctctgagttgggtgtgtgccaggggtagccagaggcttcatataactcttttcaccctttcaggaaacaggactcatttgggatattatggaatgtatttaaaccatgatacggtgccttccacgcactgcccttttccatacagctaagagcagaagctatgcccttggttttttttttttttttttttaaagatttatttattatatgtaagtacactgtagctgtcttcagacacaccagaagagggtgtcagatctcgttacggatggttgtgagccaccatgtggttgctgggatttgaactccggacctttggaagagcagtcgggtacctcttacccactgagccatctcaccagccctgcccttggttttaaacttggtttttcctccctgtactggctctagaatgtttgcttacaagttacatttatttatttctgtggggtgtggatgtggggtggggtgtaggtcagagcacagcttactggagttgggaggtggctctctcattcgatattgtggttcctggaaatagactcgggtcattaaggtatgatgacaaccacctttacgtcctgagccacttcaccagccccagaatacattcccgttttagtttttcaatggattgtgggcctgctagccctggggctgttgggcatctgttcccttaatcttggggtcttggtccagcgactgagtttacctcctgtctttcactgacggaatgtgcctcttgtgttggtcactgggcatggttcctcggtgccctttttccttccgtttcctgggcatctgtatttactgaggctgggagaggcagctgacgtttcttccctttgcccaggtgtggtctggggtattgccttggtatctgcctgggcaggtcgagggattgcaccagtgaggccttgcaaaggaacttgggctgtctgcttccaggcacagctcagttgtatgcagagttgagcctctttgtttgccttgggtccctggagtcatcctcaggagagaacatatatttatctttgaaggctctggaagtctgacccactctaacttcagaagcgggagcccagggttccgttggcaccaggtttctaggtctcctcttttgaggatcacactctctgtctttgagccagaattggccatagaacaggccaccttctggagccacagcagggagccaactgaaccagcttgaccaggtcttacagttttgtgatctttgtgtgcactgaccgttttccacgaaagcattaggactgtggctggcctggggttgagtgagcctcctctcgtctgatccctaaggcccctatatggagcactagatgtggggatgacaggagagtggaggaggttagaaggaatcttttcttcctatgagaaacatcccatttattatttatttgtgcgagcgtgggagtcagtgttctcctcctggtgtccccaggattgaacttaggtcatcaggctggttggcaagcgcctttacccactgagccatcctgtccctcctcagtatcactctgtaacccaggctggctttgagggcactgtgctagtagcctcctcactgatggcagtcttcctgctctgtcttctgagtgctggggttgctgggatataccacccaacccgggtcatttttgagtggtgcagtcgaatgcttggtaatgattagtccagtctctggctccccagagattctgcctgacagtctctttttttttttaattagatttattcattttattttctgcgtgagtattttacccgtgtaagtatctgtgcgacaccacctgtgtaccgtgtgtgtttggtgctcttggaggtcaaaagaaggcgttggatctcctggaactggagttccagctggtaactacgtgtgggtgctggcactcaaacccgggtcctctgaaagagttccaagagctcctaacctctgagccccctcttcagccccctacctacaacccttaagcagtctattattgtcctgactttgcttaacgaaccacagggctccgtgctgagttggtgcataggaggcctccagtacagcacagggccagtcctggtagagccttgtaagtcctagctagcaatgctggctggataacctcctgaggcatgtctactctgcagtcttctagggaacagctttccattctgtgcttaatgcagatcgtggctcaacgtctgttttcacggtgtgaggggacaggcccttgccagtggctttacctgtcacctccaaagttcactggactgacccccctgctctgtttgggaacttttctgtgctgtgtgcttcaagtcacccaggaaaagtagttgtcctaggtcctcccagccccacctgtggtcccttactgtcttcctaaaggcctggtgtagagactagcctgagaagctggtaggcctctattttggacagagtgcagctgcccagctgttgtgcaagctgtccccagggtttgagcttggcatggcctggtacaacgagtcttgtctctgggctgagtcctgaggcccacctccccaggctgctaccctctgcatattggggaccagtggagtgggtgcattctagtaccccgtctggtggctctggtggacctggtgatgccgggacaagccacatggcactgtccacattgggagcattcctctcttgccagcaatcacacaagcttgtttgtcctgccagggcctggcttgtgttatgtccgaagctttgtgcccagtgcccttgtctgtgccatgtcgtcccagattaccctgtggctgtttcttggagatggtttgatgtcgctgagcatgtttgtgtgtcatcggagccaggggaggagtggcttgccctagcagctggattccagggtgtcagaggagagctgggtacttggctggagcctggcaggcatatgggccttcaatgttggatttcaggcatgtgggtcttcttccatggccctcataatttggggctggtgactgggaagtgactcaggggcctctccttctgtgagctagtggggtgctaggcaccacctctttcttaccctgccagggccttccgccccacccaggtaagatccgaagagccagtgtctgcttgcttggcagtgcagactccttccaggattgggaaatatttgctgactcagggtgagatcgacagtctcccatggtgtgtgtgtgtatgtgtgtgtgaggtcatatgggaccacatgttcttgagtcctagtgttcagttagaacaccctaagctctctttttggaccctggcaccactcagttaccgacactggctcctttccaccttacagtgctgtgcagcggtgtgggtatgcgcatgggactcactcagaggctcctgctcactgacagatgaagacaaacccacggtaaaggtaagcccgcttcgcagacttgggtgtcgggctgactgccacaggctcctggccttgaaggagtcaccaggctgagtccccgatcacctgtgcggccacctgcacctattgcttacggtgacgattgctcatcgactgtgtgcggcttaggtagatcttttagcagtgtggagattctcacctttatacccacaaggatatggactttctcttgtgtctgaggggctgcttgctaaatagggtagccagtgtttgttgagtggcgtagaggatcctgggccaccagggtgctgttcatcacttccttccatttacccaatagatgagtggtgtttggtttctggatatgtagtcgggcaggtctagaactccagctcaccccttctccttcccaagtgctggaattggaggcatgtaacatcacgcttgctcaggaaaacatgtgccaggctctggggacacgatagagccgtttaatccccgcccccaggtctgtggggcaataacagggctcttccttctctgctgggtgtccagttctcagcaaaatctaacaatgccttgggcttcccacactgcttccctgttctcaggatgcttggcaggttatagaaactctcagaaggggcacaccagggagtttgatggtcattgtcttaatggcttggcaggcagggctatggtgggtccctgctgggggcaggggaaacctggccctgttttaatctctgatgtttgggggttcaggagctgtttgtgggatccatttcccttactcccgagttttacagcctgcagattttcctgttgccaaacaggagttgaccagcctgggtctggctgcctgtcacagggtcaggttgtttctggatccttccggaaggtctggggcaagagcccctccctgcagttctcagaaccacatctaacgtgggcttggtgggaagaggagacctgtgtaagatacgttcccgatatcagggagctggcaggggctcagggtgtgatggcgagtttatcttcagtcagcatcctgagggatgaagatacaggggtgctgggctctggaggcaccatgcaaaaagaacagttttcaaacttgtgatctcaataccccacacaccctactttttgaccctatgtagccctgtcctggaacttacttgtagaccaggctggcctcaaattcagagatctgcccgcctctgcctccagagcgctgggattaaaggcatgaaccacataatctagccccctctaatttttaaattacatgtatttgtctgtgtgtctgtctgcttgtgtgtctgtctgtctgtgtctgtgtgcatatgtatgtggacagcagctgcttgtagcatggtggctaggctctgaacacaaacatcccagagcgattgcactgaggagacggagctctctcgtgacctggtctcggaaatcagggtgtcatcgcctctgttcttttgatcacaggcccagttctcatcagagggaggatgacagccaggtgt

SEQ ID NO: 179 - DNA, 1865 bp, Mus musculus
ctcagaaagtccatcaaccaagaccggttcctgctgcgtctggcaggccttgactatgagctagcccacaagccaggcctgggagctggggaccgagcagagctggtggaggtctgccgacctgggcagcaccgagcaggcaccaagtgtgtcagctgcccgcagggaacgtattaccacggccagacggagcagtgtgtgccatgcccagcgggcaccttccaggagagggaagggcagctctcctgcgacctttgccctgggagtgatgcccatgggcctcttggagccaccaacgtcaccacgtgtgcaggtcagtgcccacctggccaccattcaggagatgggtttaagccctgccagccatgcccccggggcacctatcagcctgaagcagggcgaaccctgtgcttcccctgtggcggaggcctcaccaccaagcatgagggggcagtctccttccaggactgcgacaccaaagtccagtgctccccgggccactactataacactagcatccatcgctgtatccgctgtgctgtgggctcctaccagccagatttccgtcagaacttctgcacccgctgcccaggaaatacaagcactgactttgatggctcgaccagtgtggcccagtgcaagaatcggcagtgtggcggggagctaggtgagttcactggctacatcgagtctcccaactacccgggcaactacccggccggtgtggagtgcgtctggaacatcaaccccccacccaagcgcaagatcctcatcgtggtccccgagatcttcctgccctccgaggatgagtgtggggacgtcctggtcatgagaaagaactgtgggtgcctgcagagccggctgggggcctccccatcctctatcaccacttacgagacctgccagacctacgagcggcccattgccttcaccgcccggtccaggaaactctggatcaacttcaagaccagtgaggccaacagcgctcgaggcttccagattccctatgtgacctacgatgaggactatgagcagctggtggaagacatagtgcgtgatggccggctgtatgcctcagaaaaccaccaggagatcctaaaggcaagtgagcgttcgctgtggtgcggatggaaatgggacaagaagcttatcaaggccttctttgaggtcctggcccaccctcaaaactacttcaagtacacagagaaacacaaggagatgctgccaaaatccttcatcaagctactgcgctccaaagtctccagcttcctgaggccttacaaatagtgcctgtgggcccgagacccagttcagagctcccacctccctggccctcagagttggcaccccaacctcagacaagaaactgtctctcttgaaggagagatatcaccacaccaggcgctctccctttcggcctttctagttaccttgtcttcgttctgtctctctcctggaagtcattcagtgcgtctctgttccccccagaggtgaaggaatagacaccctctattcctctgccgttatagcatggtgccttgctagccaggagccaaaacaccccctccacagcccccgtgctccccagagtgggtcttcacagcccagagtcctgccaaagaagccttggacatagcagctttgtgccagcatcaggctgctggggcacagagtttaagcccggggtgcccacacagttggcgttctcatctgtagagcttgctctcatctggccggggctgactccatagggtttacaagtgatccataccaatgggatagcaaacccctgccgggtaagggcgaggagcaggcaggggccctggacatataaagctctcagatagctctgcaggacagaaagc

SEQ ID NO: 180 - protein, 422 aa, Mus musculus
LRKSINQDRFLLRLAGLDYELAHKPGLGAGDRAELVEVCRPGQHRAGTKCVSCPQGTYYHGQTEQCVPCPAGTFQEREGQLSCDLCPGSDAHGPLGATNVTTCAGQCPPGHHSGDGFKPCQPCPRGTYQPEAGRTLCFPCGGGLTTKHEGAVSFQDCDTKVQCSPGHYYNTSIHRCIRCAVGSYQPDFRQNFCTRCPGNTSTDFDGSTSVAQCKNRQCGGELGEFTGYIESPNYPGNYPAGVECVWNINPPPKRKILIVVPEIFLPSEDECGDVLVMRKNCGCLQSRLGDSSITTYETCQTYERPIAFTARSRKLWINFKTSEANSRFQIPYVTYDEDYEQLVEDIVRDGRLYASENHQEILKASSLWCGWKWDKKLIKAFFEVLAHPQNYFKYTEKHKEMLPKSFIKLLRSKVSSFLRPYK

SEQ ID NO: 181 - DNA, 4447 bp, Mus musculus
tcccaccaagcccctgtcttcacagatgtggatgagtgtgcagagggcaacggtggctgccagcagagctgtgtcaacatgatgggcagctacgagtgccattgcagagatggcttcttcctcagtgacaaccagcacacctgtatccagcggccagaagaaggaatgaactgcatgaacaagaaccacggctgtgcccacatttgccgggagactcccaaggggggcattgcctgtgaatgccgccctggcttcgagctcaccaagaaccaacgggactgtaaattgacctgcaactatggtaatggcggctgccagcacacctgcgatgacacggagcagggtcctcggtgcggctgccacgtcaagtttgtgctccacaccgacgggaagacatgcattgaaacctgtgctgtcaacaacggaggctgcgacagtaagtgccatgatgcagcgaccggagtccactgcagctgtcctgtgggtttcatgctgcagccagacagaaagacctgcaaagatatagacgagtgccgcttaaacaacgggggctgtgaccacatctgccgcaacacagtgggcagcttcgagtgcagctgcaagaagggctacaagcttctcatcaacgaaaggagctgccaggatatagatgagtgctccttcgaccgaacctgtgaccacatgtgtgtcaacaccccggggagcttccagtgtctctgtcatcgtggctaccttctatatggtgtcactcactgcggggatgtggacgaatgtagcatcaataagggaggctgccgctttggctgcatcaacaccccaggcagctatcagtgtacctgcccagcaggccagggccgccttcactggaacgggaaggattgcacagctggctgtgggctgccttgcctccgacagcggatggaacggaggctgaaagggtccctgaagatgctcagaaagtccatcaaccaagaccggttcctgctgcgtctggcaggccttgactatgagctagcccacaagccaggcctgggagctggggaccgagcagagctggtggaggtctgccgacctgggcagcaccgagcaggcaccaagtgtggggagaagctgcttgaagggcaagtgatccagctggaggacgggaccactgcgtacattcaccaggtgacgatacagaaagagtctttctcctttgaagatggtcagcccgtgcagctggaagacggcagcatggcctacatacaccacacacccaaaggtgggcccgtgggcatcgtggctgagggctgtgaccccagcgccctggaagctgtccagctggaagacggttccactgcctacatccatcaccctgtgcctgtgccgtcggacagcgccatcctggctgtgcagacggaggcgggcttggaggacctggcagcggaagacgaggaaggcttcggcacggacacagtggtggccctggagcagtatgccagcaaggttctgcacgatagccctgcttcccacaatggcaaagggcagcaggttggagaccgagctttccgctgtggctacaagggctgtggtcgtctctacaccactgcccatcacttaaaggtccacgaacgagctcacacaggggaccgcccatacaggtgtgactttcccagctgtggaaaggcctttgcaacaggctatgggctaaaaagtcatgttcgtactcacacgggtgagaaaccatacaagtgcccagaggagctgtgcagcaaagccttcaagacctcaggggacctgcagaaacacgtgcggacccacacaggtgagcgcccattccggtgcccttttgagggctgtggccgctccttcaccacatcaaatatccgcaaggtacatgtgcgcacccacacaggcgagcggccctacacctgccccgagccccactgtggtcgtggcttcaccagcgccaccaactacaagaatcatgtgcgcatccatacagtgtccccaggggagaagccatacgtttgcacggtgccaggctgcggaaagcgctttacggagtactcgagcctgtacaaacaccacgtggtgcacacacattgcaagccctacacgtgcagtagctgtggcaagacctaccggcaaacctccaccctggccatgcacaagcgcagcgcacacggggagctggaggccacggaggagagcgagcaggccctgtatgagcagcagcagctggaggccgcctctgctgctgaggaaagccccccacccaaaccaacccacattgcttacctttcggaagtgaaggaagagagcagtgccatcccaacccaagtagccatggtgacggaggaggatgggccccctcaggtggctctgatcactcaggacggtacccagcaggtcagcctgtccccagaagacctgcaggccctggggagtgccatcagtgtggtgacacagcacggcagcaccaccctcaccatccccggtcatcatgaagaactagccacatctggcacacacacggtcaccatggtcagcgctgatggcacgcagactcagcccccgtttgcatttcctgaaaccggatcttggtgtcagagccgcccctgggccggggcgggcgcctcagccatggccctgcgcaaggagctgctcaagtctatctggtacgccttcactgcactggacgtggagaagagcggcaaggtctccaagtcccaactcaaggtgctgtcccacaacctgtacactgtcctgaacatcccccatgaccccgtggccctggaggagcacttccgggatgacgatgatggcccggtgtccagtcaaggttacatgccctacctcaacaagtacatcctagacaaggtggaggagggagctttcgttaaggagcacttcgatgagttgtgctggaccctgactgccaagaagaactacagggcagatggcatcgggagcagcccactctctaatcaggatgctttccgtctatggtgcctcttcaacttcctgtctgaggacaagtacccgctgatcatggttcccgatgaggtagagtatctgctgaagaagctccttggcagcctgagtttggagatgggcctgggcgagctggaggagctgctggcccaggacgcccagtcagcccagaccgccgtggggctcagcgtctggcagtttctggaactcttcaactcaggccgctgccttcggggtgtggggcgcgactccctcagcatggccatccaagaagtctaccaggagctcatccaagacgtcctgaagcagggctatctgtggaagcgagggcacctgcggaggaactgggccgagcgctggttccagctgcaacccagcagcctctgctactttgggagtgaggaatgcaaggagaaacgaggcaccattcccctggatgctcactgctgtgtggaggtgcttccggaccgcgaaggaaagcgctgcatgttttgtgtgaagactgccagccgcacctatgagatgagcgcctcagacacccgccagcgccaggagtggacggccgaggaggagcgccgccgtagccagcacaaggagctgcagcaggctctggagggccagctgcgggaggcggagcaggcccgggcctctatgcaggctgagatggagctgaagaaggaagaggcggcccggcaacggcagcgcatcgctgaactggaggagatgcaggagcggctgcaggaagctctgcaactagaggtgaaagctaggcgggatgaggaggccgtgcgcctcgcccagaccaggctgctggaggaggaggaggagaagctgaagcagctgatgcatctgaaggaggagcaagagcgctacatcgagcgagcgcagcaggagaagcaggagctccagcaggagatggcgctgcagagccgttccctgcagcacgcccagcagcagctggaggaagtgcggcagaaccggcagagggcagacgaggacgtggaggctgcccagaggaagttgcgccaggccagcaccaacgtgaaacactggaatgtccagatgaacaggctcatgcatccgatcgagccaggagataagcgacccaccaccagcagctccttcacgggcttccagccccctccgcttgcccgccgggactcctctctaaagcgcctgacccgctggggttcccaaggaagaaaaactggatccagcaccagggaattagctccgaccacccccttgttcttccgatgctgtgtctacggacttggccacagcaggcctgtgggtgattcctggtgctaccacctgccgaccaaaagccgatcaaggattgaactttcaaggatctgggaccagaactgggaaagaaaaggaatgaccaagacaagatcatacgcccctccctccagaccaagttatggagacatacttccaaataaaactgctcacaactgcccactgc

SEQ ID NO: 182 - protein, 1475 aa, Mus musculus
  VARIANT (1)...(1475): Xaa = Any Amino Acid
SHQAPVFTDVDECAEGNGGCQQSCVNMMGSYECHCRDGFFLSDNQHTCIQRPEEGMNCMNKNHGCAHICRETPKGGIACECRPGFELTKNQRDCKLTCNYGNGGCQHTCDDTEQGPRCGCHVKFVLHTDGKTCIETCAVNNGGCDSKCHDAATGVHCSCPVGFMLQPDRKTCKDIDECRLNNGGCDHICRNTVGSFECSCKKGYKLLINERSCQDIDECSFDRTCDHMCVNTPGSFQCLCHRGYLLYGVTHCGDVDECSINKGGCRFGCINTPGSYQCTCPAGQGRLHWNGKDCTAGCGLPCLRQRMERRLKGSLKMLRKSINQDRFLLRLAGLDYELAHKPGLGAGDRAELVEVCRPGQHRAGTKCGEKLLEGQVIQLEDGTTAYIHQVTIQKESFSFEDGQPVQLEDGSMAYIHHTPKGGPVGIVAEGCDPSALEAVQLEDGSTAYIHHPVPVPSDSAILAVQTEAGLEDLAAEDEEGFGTDTVVEQYASKVLHDSPASHNGKGQQVGDRAFRCGYKGCGRLYTTAHHLKVHERAHTGDRPYRCDFPSCGKAFATGYGLKSHVRTHTGEKPYKCPEELCSKAFKTSGDLQKHVRTHTGERPFRCPFEGCGRSFTTSNIRKVHVRTHTGERPYTCPEPHCGRGFTSATNYKNHVRIHTVSPGEKPYVCTVPGCGKRFTEYSSLYKHHVVHTHCKPYTCSSCGKYQTSTLAMHKRSAHGELEATEESEQALYEQQQLEAASAAEESPPPKPTHIAYLSEVKEESSAIPTQVAMVTEEDGPPQVITQDGTQQVSLSPEDLQALGSAISVVTQHGSTTLTIPGHHEELATSGTHTVTMVSADGTQTQPPFAFPETGSWCQSRPWAGAGASAMALRKELLKSIWYAFTALDVEKSGKVSKSQLKVLSHNLYTVLNIPHDPVEEHFRDDDDGPVSSQGYMPYLNKYILDKVEEGAFVKEHFDELCWTLTAKKNYRADGIGSSPLSNQDAFRLWCLFNFLSEDKYPLIMVPDEVEYLLKKLLGSLSLEMGLGELEELLAQDAQSAQTAVGLSVWQFLELFNSGRCLRGVGRDSLSMAIQEVYQELIQDVLKQGYLWKRGHLRRNWAERWFQLQPSSLCYFGSEECKEKRGTIPLDAHCCVEVLPDREGKRCMFCVKTASRTYEMSASDTRQRQEWTAEEERRRSQHKELQQALEGQLREAEQARASMQAEMELKKEEAARQRQRIAELEEMQERLQEALQLEVKARRDEEAVRLAQTRLLEEEEEKLKQLMHLKEEQERYIERAQQEKQELQQEMALQSRSLQHAQQQLEEVRQNRQRADEDVEAAQRKLRQASTNVKHWNVQMNRLMHPIEPGDKRPTTSSSFTGFQPPPLARRDSSLKRLTRWGSQGRKTGSSTRELAPTTPLFFRCCVYGLGHSRPVGDSWCYHLPTKSRSRIELSRIWDQNWERKGMTKTRSYAPPSRPSYGDILPNKTAHNCPLX

SEQ ID NO: 183 - DNA, 56181 bp, Homo sapiens
gccagcctggagccacctacctctggcctcaggctgtgggcagcaaaaggaatgtgtgtgcacttggcgagcctcctgcccaccctgtccacacctaataagtgcaatcattttgagtctttctatgttgtctagacggaggggtttttgttttctgggtttgttttttgtttttgtttcttcttcctctattagcaaaaccctatttatagctgcccaagagaaaagagtgtatgtttggagtggaagaaaatcggttttgaatctcatgaaccttgagtgctggagcatctgatctgtctctatgccaccactggccacctagagcccttggctgtggtaatccagggtaattgcgcagaggcatctgatgtgtaggaaagtaattctggggatttgatggagcagaaaggagagagacctatgtttgctaaaccaatcttgctatccctatgcctctccatggagtcagtgtggacctcatgattatagaggccaatggaactggtcagtgattctctaccccaagtagggaaaacctccatcttttccctgtcttcatcctgttatcccctggtgtacacatggaagaggaccaggacataccacctggggatgggctgactcagggtcccgaggccagagacaaagctgtgggagccaagaataagacagaaggcatcagatatttgcctggctctggtcacttccctttgaagttgacttcaagcttagcttcctcaactactgtttttcagaaggaagaaagaatcaaatggaagaagaatcaagtccatgcccaagcccaaagcctgcacacattctgcccttaatccaagtgttgcctataaaattattttctgttttctcactctagttcccccaaagctgtagtcccaatcaatcaaaggctaccaactgagtcctcaggttcatttcttttttttttttttttctttttaactctcctggtaactcacagaacagctcaggttcatttctaggtgactgtcctaggctactgctcccccaggagactcaacactaaataaaggagtctgactccctgccctcccatcagtagcattcatcagccaaaacggccatagcagtaggtagccaatgacacagctagattccctgacaaccattagccaacatcatggtccttgtgggtagagtgtctggctacctttgtctttctgggtcaaggagggccactgtaaagatgcaaaatggctgcttccaaacaagggaaatggtcatttagtatgagtgtctctgtacttcccaggaagcaccatgaaaactgctttaatcaactctgactatcctaattctccaccagaagctaggataactttctttctttctttcttttttttttttttttttttgagatggagtctcgctctgtcacccaggctggagtgtaatggtgctatctcggcctactgcaacctccgcctcccaggctcaagcaattctgcctcggcctcccaagtagctgggattacaggcatgcgccaccgcgcccagctaatttttgtatttttagtagagatggggtttcaccatgttgcccgggctggtcttgaactcttgacctcaggtgatccacccgcctcagtctcccaaagtgctgggattacaggcatgagccaccgcgcccagcctaggataactttctgattcctctctgccagccgttttgcgtctcttggaaagccaaacggtgaccatgcttcttaatttatgccttcagggtctggcttctcctttctcccttcctttcctgtcacaccatgcatacatacatacaaatacacatccttcaaccatttattccatggcttatgagacctgcaaatgagttccacagtacggaaggcatagaccactaggcttcttaattgatgtcaaggcagatcttggtgagcaggtaaaaacctgctattgtccaccaagtttaatttaggtcctccaagttggagggttaagaacccaggcaaagctgctgctgaatctatggaggaggctggccctgggacatcaaactaggggttaactggattgaatgaggagtcaacgctcagggacattctaggtctttacaggtcagacagaagagaggtttttaccattggagggaaatggaaagatggtataaataggatcccttcatgaagcaacccagaggcctctctgcagcgtgtagggtgtggggcgacagtattgtggggcttccattcatcttagtacaaaacctcacctgctctgagcctggaaatgggagggcttcacgcaccaagtaatgcacaccagaaaggcacttatatcctcagcaacatggcagttcctctttacttctctgcctccctctttctatattatcaggccatgcctattcctacaacctgagacaactcttggagtcagaagaaaactgaccagatcctggatctgagctgcctgctccaggcctagaaatccccaaaggctggcactgagctgtgactgctttaacagcccccaagatttggtcagtttgaggtggtggagactcagatttgttgctgaaagttcagtaacacagtcctggtctttggccctagagaaactttttatatgagaagtgttctctatatacatgtttgaggtgactctggaatggattatgaggtcatatctcaaaatgtcagaaaacgttatagagcactcgaacttttgtatttgctgcttaacctcaatattacagccacaaacaaggggtaccaagacaaagtataactgagcataagcagaaaatgttaaccctccaggtttctttcttaagcacaataaaagtgggagcgaacaacacaaggatatttttacatttgacccgtctcaaaagtagcacaccctatccttgtgccattatttgtacaaggaaatatatgattagaaggaatagaacccccagttgtcatcagcttttttagacaccacaggttgtagcagtttgaacaaactgaaaactttatacttctgtgtgagctgaactcaagtttcagaataatcatcgccatgtgggaggctttttgttaaatgcagaagaaatttcaaaatattgtatttatatctgccttccactgctgccaatttagtaagcatctcctatacaatcgacaataaacagcaaatgatgcagttcatagagtattttgcacttggggaaaaatatgtatctgaattgtaaaaagaaatgtttggattttgtatgtcttttttattattattaaaatactaaatgaaactcctcagcccggcatcttttcctctatctcaatagcttatcccagagccagaaaaagccttgaggagacaatgtcttctggcttccagataaaacttaacccaaattttttggcaactcatccctaatgattttaaaatttgaaaaggcttgtcttttctctgtccttaaaagcagcatcaagtattatctcctgagggggatctaaggagtgggggaaatttattgttcctcctctccacagtacagtccacaacagctggccagcccacaggtggttcagcacctccctactcaggatgtcccacctctaggaaagcgccagcactgagggtcacccagtgtcattctttgtatgcagtacactcttagccaccaaatagtattgtgaaatacagatcatttagtcactaccaccatcactactcctacagggcaggagaaagcaatctccaatctctattataaatgaacagtcccaatttctaggctcagagatatagataaaactttgctgttgcaattatataattccctttcatgaaattttattggatttaatatctacatgatatagccatttaagagtataacttgagcaacaaggaaaaatctacctgatcaaaaaacatgtggggtggcctatcagaatcttaaacttaccctttagcatctataatgaagatacagatgaagtacattcattccataattactgagatcctattatatgccaggtagtgagcacctgctcatcagcttattgacaatagccatgctcaagatccacactcctcatgtaactttctgattataattgatcttcccagataagatttacccaacaggagcgataatccagttcacttggtggctgtaagtataaaagaatgcactggcattctattatgtacattaacttcctatgagtttgatttaatgtgacaaaacatgaacacctttgtgtggactgacccaaaatcacacttctagaactgcaaagccaaggaccatatccatgaccttcacactataccaacttggagccatcctctttgacttctctcataactcacttctattctaagaacaacacgtcttcctccttacttcgtaggacatttgctttggtgtctcaaaataatggatagtcagggacattggagtttggatatgcctatattaagaagtcttccaagtggggtaaatgaagatttttcctagggtacgtaagactgcaaggaatacccaggaaatagcctcaaatcagtctgaggagagttttaaaggaataaatttccagatcctcaacttccctataaaatattttctaaaaccaggccgggtgcactggctcacacctgtaatcccagcactttgggaggctgtagcgggcggatcgcctgaggtaagagtttgagaccagcctggccaacatagtgaaaccccatttctactaaaaatacaaaaattaaccgggtgtggcagtgcacacctgtaattatagctacctgggaggctgaggcaggagaatctcttgaacccaggaaggggaggttgcagggagctgaattgggccactgcactccagcctgggtaacagagcaagactccatctcagaaaaaaaaaaaaacaaacagccgggcatggtggcaggcacctgtaatcccagctacttggcaggctgaggcatgagaatcgcttgaacccaggaggcggaggtggcagtgagccgaggtcgtgccactgcactccagcctgggcaacaggagcaaaacttcatctcaaaaaacaaaaacaaaaacaaaaaaaacggccaggcacagtggctcatgcttgtaatccccgcactttgggaggccaagacaggcagatcacaaggtcaggagtttgagaccagcatgaccaacaaggtgaaaccccatctctactaaaaatacaaaaattagccgggcgtggtggcacgcgcctataatcccagctactcaggaggctgaggcaggagaatcgcttgaacccgggaggcagaggttacagtgagctgagatcatgccattgcactccagcctgggtgacagagcgaggctccgtctcaaaaaaaaaaaaaaaaaaaaattctaaaaaccaatccatttgggagccagctgacatattcatgcacattctccactctaccactgcccccactttcaccatagtccttgtcctactttacaaaagaaaggaatgtctctcccctacactgaatcttgatgcatggtccagggtgtaaaaacctgaggagctgggagggagcaattattttccacttcatatcaaaatattcccattgcaatcagtcttcctattttatcttatataaaatgtttattattttctacctcctagtaaaaagtgaaattgctagctgctcaattcattatttcttagcaaatacagctttcctttctaaaaaatacagaagaaaaaaatttgtgtaacaagattattagttatttctgatttttagacatgattctcatttaattgttcccaaaagctgaacaacaagagtttgatgaaagcaggcacacacatttaccaagggaatatatgccttctatatgacttctcaaaactgatggatttaactatacattatacagcattattcctaattatataatgaaaaacagtactatcttatttttaccatttattatgttaatagtaggtctaaataattttaatcttgactggtttatcagtggtccattttataagctatagttaatcatttatttcctaataatttttataatattcctcaaaatgaatgttaacatatttatttgaatggaagaataaagtcagacatgtttctaacagaaagtaggtctgatttggctgattggtttgaaatgaaaactggctttgccaattccacaaatggcagttgttttctatacagtgaatgagctgaatctgcatttcagtttaacaaaaagttcttgaagacatgtaataattaaagaattttaccaaaaaatattgtgtaggcaaagaagtatggaaatcaatatctgattaacaaagtgtctctgagtgtaaaggtcacagataattaataatcatgtttaataaaaccaaaactgagactctaataactaaatccttttggaagttcagtggtttctaatcctttgcttttaacaaaattaaaagaagactctatttgatagtattaatagatcactctgtgattgttggcatataatttagaagttcaaagactcaaagaatatcattgtaacaaatctcttcctttcccaattgtggaaacaaggtttctcaatactcatgtctataaaaataaaaaacaggtaaaggattgatgttgcaccttatctccttctaccattaggtaatattaatccatgaatacctgaactaattggggagaaacaccatatttctcattaacagatgcattttcaataaaaattgtactttttaggtttcacaagtcataaaaatgttaaaaatatttaggaaaatttagtatttagtaatatttagtaaaaaaaaaaagtttagtaagttatatactaatgattacaggaagtgaatggaattcaaagtataaggagaaagagaaccatataaaatttctgttgaagagcttgttcatatatttttaagtggatgatggtaggcattagatttttagggtacttggaatccaccggatacttttttttaatgtgagacagtctcactctgtagcccaggctagagtgcagtggcacgatctcagctcactgcaacctccgcctcccgagttcaagtgattctcctgcctcagcctcccgagtagctaggactacaggtacgcaccaccatgcccgcctaatttttgtatttttagtagaaacaaggtttcaccatcttggccaggctggtctcgaactcctggcctcgggatccgcctgtctcagcctcccaaagtgctgggattacaagcatgagccactgtgcctgccctgccagatacattaagaatgatgtagaccaagtgtggtggctcatgcctgtaatctcagcactttgggaggccaaggcgggcggatcacgaggtcaggagatcgagaccatcctggctaacaccatgaaaccccgtttctactaaaaattagccaggcatggtggcgcatacctgtagtcccagctactcgggaggctgaggcaggagaattgcttgaacctggaaggggaagttgcagtgagctgagattttcgccactgcagcactccagcctggttgacagagcgagactccgtctcagaaaaaaagaatgatgtaagtcttagtttaagatgtcaaaatttgaaattgtatcctctataagtatttaaattaatgaaggaaaatttaggtatcaacttaaaaatgaacaagaggtacatagctcttcaaaattcttttatgggttcattctaaaaaatgtctgaagatcaccagcctatatgttgagtggaagggataggagagaaactgctagcaatggtcttcaatactgccctccaaaatatcctcaccaattctcctgagaacctgaaattaccttccattaggatcattacttcagattcagacactgtttcccagagctcttgttaaatgtataattgcagaggtgactggccatcagattacgatccgtaaggaatgtgagaaaagacagatatatatatacagagagagctatggaaaaagggtggttggagagggacaaactcaggtacagcctgagttctattccctgcggtatttctaaccctcaattcatattataagaggagctacttaatcttctctctgtatctataaggtactttttctttttctttttttttttctttttttgagacggagtcacactgttgcccgcgctggactgcaatggtgcgatcttggctcactgcaacctccgcctcccgggttcaagcaattctcctgcctcaacctccggagtagctgggattacaggcgcccgccaccacgcccagctaatttttttgtatttttagtagagagggggggtttcactatgttgaccaggctggtctcgaactcctgacctcgtgatccgcccgcctcagcctcccaaagtgctgggattacaggcgtttaagccacggcgcccggcctataagttattttctatgggaaataacttgtcaaacttccaccaaaaaggaatggaaagagggcagcatagtggccaggcagtttatttccatactaggagatacagaagggattaattctaaccgtaggaattctaaccatcaaatgtcactcactggcctacctaaactgaactctggtcccagccagaacaagtcaggaagaggggatgtctaagaccgaaaggggggctttctagttaagctcttcaggcaggagaggaaaaggatgcccgcatccccaaagacacctttagctaccacaagccccaaaccccgtactttgtaactgtgtctagtttacgtcctttaaaaattattcttattaagttaaattgttttcggggcggggaagatacaaaagaaaccagttaaagtctgaaaggatagagaggggaaagtttctcacctcattcttccagccacccagttcctctcctaaaaggcaatctttaccagttccttctctaacgcccctcctttttaatttgattttttaccgaaagctcgctcccttttaattttccctcaggtttctgaaaatttcccaatcgcagcccctcccagcagggaaatagtaaaggggcttggtttttatgttcaacccaaagcaagcctacaaaagggagtagtcggtttcgagcctgacggtggagctgacgcgggaatgagagagaacctgagaagaccgccagggcgccctccctgcggaggcgagtccctcaccgcccctctacatcgtccttttcaataaggagctcttaatacctgcaactgcttccttcaaggggtggctggaagatcagtaggcaaggcctgcggactgcgcaccttaaagcgcttcgggaccgtaagacagtgagtgctgagcgcgcggccgggaagaagcctggaggctctgagctcggaggacagagaccgaagccccagggcctgcgtccctcacaacctgcgcctcctgtcctcccgcgctactcccgaagcgcaccttctcgcccgcaggccgcagaagtgatgacgcaaagccctcggggcctccgccacctcctcacgcttctgctggaccgaatccttggaatggacaggtagcggttcccgattgctatagcgacgacccggctccgagccgcgcccaggccctgacccgggcgtcgtgacgtcagcacgccttccctgggcgctcagcctcgctggccatgcgtcaccccggccttggtgggggcggggctccgaagagctcggttcagatcccggccgcctgggctccaggagccccggaaccaggataagttggatggctgccgcggcgaagcggggggcggggtggaccgtgcccggtattttctatacgggttccggggcccggtagaggcgcgccaagaggaaaggaaagtgcggcggccctggaacctggatatcgcgcgaggcaagctgcgcgcgggcgggcgggctatggcgcaggcgggttgtggggccggcgctggtggcggggcccggtgcatggcggtctgtcggcggagtcgccctcgggggctgtcaggttggtggctgcgggaggagtgggccaaccatgcccagggcgggaggccgggcgggcgcaggaccccgggaaggtcccgagcccggcgtgcccacctccctccggccctagcagggcggcctggccgctggaccgcggccgggccccctcccccacccagggtccctgcccctcttttccgccttgcggctcctcccccgtgactcccaaacctcaccccgtgacggcgcccgcctccacccttgtgaccccacaccccacccactgaccccaagacctcaccaggtaaccgttggttattattcattggctgctaacccaggaatttccccagcacttctcagagacccaccaaccagtgactccctcagttttaatccggtgactcacatgaccctgagatccccacactcctccttagtgacccccaaacctgggtaaccctcctggcccagtaacccccccgattctaccttgtgttccccacaaactcggtgactcccctcaaaactctgctggcgactcctaagccctactccaatagttttccacgcactcaccttgtacacaaccctcagtatctttatcctgtagccgtatgaccctcgttccacgtctgcctttatcctaaaatcacccccactggcatctctctctgcgatcccagcccttcagtgtcaatcagcacatgacttacaagcgtccagcacctttctggtgctaaggaggatatagagattaatatgaagtagtaataattggaggcatgagagaattctggatcaatccagaatccagtcaatccagtgtgtggtcccagctctgtcactgctgtgctttagggacctgtgagaagtcccctcctcagtctggacctcagtttctcatcatgactgtgatgaggttgggttagatgatctttgagtttccttccgtctgtgaaattgtgaaattatgcagttctcagtcaagataataattttttgcaatcatttttgtaccccaccctggaaatttcctcttgtaacctcatcccaggatctgcttgcatcatgaaccttactccctcattcccggatcaccctcttcactcttcatagtgcatacccatttcccttgatcaggccccatcagttaacatgtttgcaaagcagtatagcagagtgcttcatttgggggcattgagttcataacaaacctaggttccagtctgattctggcccttcagctatgggacttttggtatattatttagcctgtcttaacttcagtctccacctctgcgaagggagaaaatagtagtgcctgacataacatatgtaaagcaccgggcaccatgcctggctcatgggaacccttagcataagctgttgttagaaatgagaagctgctatggatcttactctgtcctgagtgctagggatttaacagactgaacatgtggcccataccttgcattatgttgctactactgacatcttggaatccctatcttctcatctctgctgtagcctcacttctctggttcttaccctgattttgcctcaataacgattggcttgctgaatacctactgtgtgccaagctctggatatataagttaaatttacgtctcaacagccccaagagttaattattattatatccaccattttcccttcccatatttttgtttggttggttggtttcagagaaatgaaccagaaactctcacagctaagtagcagagctaagatttgaacccacagtttaaaaaaacaaaacaaaaccctactccattgcctgtctttcccccagacttactcaacctcagctccttattccttattttctagtaattcctaaatacaacatcagctcgttccttgatccctaaggtttctgttcttgagctcctagcctcaagagatcctcccaccttagcctctcaagtagttgagattataggcgtgagccaccaagactggccctgacccccaaggtttctattaccgtttgccatgtaacttggtgactttctcatcctgctgttcatgacttttgatctcatatcccctgaagcccctgcaccttgtaggggagggaaaatatcttcttaggttcatggcttaggcccctataacaacagatttaataagagaagattatatacatttatttaatgtaagttttatgtgacaggagccttcataaggaaatgaagacctaaagaaatgattaaacttgtatatttttatactagatctgatgaagagtggatagttgtggaaaaatacaaaaagggtaatatcaaatagtaataaactgggagaaacttagcaaggcctgtttgttcagactcttctctgtgtccctgtgtcttcacagataagggtgcttctttcctctgagtatagggagggcacctctttatgagggtattatgacctgcttcaggggaaagtcagaaaaatccttcctaggttttgtgatctgcttcaggggagaagagcctcagagaaagtgagagtgaccttcctactgccattttctcaagttgccatattttggagtagtgtcttgaacccagtcaacttctctcttcatcctttgcccaaatatctcttgttctatgaatctttgacgcttccagccctttccctgtgaactcactcaccatacagtgtctcccacctcactggcactttaccccaaatcctttcatcttgttaagtcccttagccccaggaatccacaagtctgtatgctctaaaaccatctagcccagttgcctttcatcctattttttagtctcagtgttctactcccaccaccccaccttctgccatcctcagccacattctgtgacctgaaaccttcatataatttgtccttcatttagtgacctcttgatgtgactagcttcaatggaatctgctccttccatcccagcatgaagcaatcctgtataacttgcacaccctcccattctaaggcctctcctctcatacccttgcccagtatcctgtgagatcctgcctctcagattcctccctcaccttttcaaacccggattgtctttcacccttccacagggcctcctcttcctgccttcctcttatttgtcccctcagccatcctcacctcaccaatcttgataattgattacaatataaatctcccttccatctcaggtctgctcctttcttcctccactctcttgtgcatctatctccagggccatgcgtatgcccctgctgctttcagctctgcttccttcatatgctgcactgttccaccaaacttcatcagtctcttcggtttatccagagaactacactcttctctgggaacttctgatgacttctgataatagatcaccaaaggatcttggttttttagagggcagggagagagccctttgaagtccttcagaatcaatctagctgtgtctcctggacaccctcccactatcctatcctgttatgaagctgcttgctgtatatgccctcagagtagaatgctttgggtgtcagcttctgcaggcactgaattagccccatggttttccaagccctgggaaaacttgataatccccaaccactgaagtctgaagagtcagtagcaaaatgtgacatcaaagatccacatccaaaagtctattctgtgggtcaccaaattcccaggtctcttataatgtacttattggctgtgcagcaataaatacagcagaaactaaaactagagttgaggaaagggtataccctgggttctacaactgctgtgggtggattttaaaaaggagttcttgccttagatttgtttacttagggcacagaacttattctgccttgtatttgagttatttgtgtacttttctcaaccccactctgtgagctctgtgagaacagagactaggttttcttttttcttttcttttcgagatggagtcttactctgtcacccaggctggagtgcagtggtgcagtcttggctcactgcaacctcctcctcctgagttcaagtgattctcacacctcagcctcccaagtagctggtgttacaggcgcctgcaaccatgcccagctaatttttgtatttttagtagagacagggtttcaccatgttggccagactgatctctaactcctgacctcaggtgatccactcgcctcagcctcccaaagtgctaggattacaggcatgagccactgcacctggctggttttctttatcttctgtcttcatctcttccctcacatttagcaggtagtcagtacttacctgttggattaaattaactcactcagaaattctgcatcaggtgtacaaaagtaaaagcagttcatgtctacattcattttgtggacacaacacccctccccaaagttctccaaacatgataatgggcatgtcccttgatttaaacgtcggtaatttagacacttccttttttagtcattgctcgggtgggggaatgggtgtaagtgcttttctttttctactgtatttctggtaagataggttgtttgacgcagttgctcaaatacagtggtaacagcatcaggggctgtcttatataaatctgttctcaagaaaacagctagtttgaaatatttagtgtgggttgcagagacgattaaggaacagaggaaaccaaggaggcaaaatgttggtaatttttgaagttggataatgggttcaagaggttcattataccattctttccatttttgtgtatgttggaaatccattataaaaagattaaaggcaggggcagctaggtgaacaagtgcaaatttagcactgttccttggaaaacacctcagagcaaatgagctactgtttctgaatcagtactgttatctaggttaagtagtatatttagtcctaacctttctctgacctcttctgtttgtgagatatcaggatgctaaatttaaaaattagcaccctgcagaattctgtacctagtggcctgggaattgtaacatcctggcatcaagcacctgttgcactgcttctcagcttaggtatggtttctggtggaatagggctggactggacctgagaagagggtgaggcagtaaggaggaaagagggactgagggctggagagagaccagagctctactagggtcttccccttcttgcctaaaggtttcaagttactgggagatcctaaaggtatatatattcattcattcactgattcattcatcccacaaatatttggtgaatatctgctgtgtgccaggtacttttctaggtactgggaatagagcagtgagctcactgtttgaggaatggacagggtagagacagacaataaacaaataagtaaaatatatattgagaaaattaagcagagaagggagatagaaagtgccaggagtaggccaggtgcagtggcacacacctgtaatcccagcactttgggaggctgggttgggtagataacatgaggccaggagtttgagaccagcctggccaacatggcgaaaccccagctctactaaaaatacaaaaattagccaggcgtggtggcaggcacctgtaatcccagctactcgggaggctgaggcacgagaatcacttcaacccaggaggcagaggttgcagtgagctgagatcacgctgctgcactccagcctgggcgacagagcgagactctgtctcaaaaaaaaaaaaaaaagaagaagaagaagaagaaaatgccaggattctgggtgttaaaattttaaatagggtagttgaagaggttcccactaaaaaggtaacatttgagcaaagacctgaaggaagttagggggtaagtcaagcatacatctaggggaagtttattccagtcaggaagaacagcaaacacaaaggccctgaggcaggaatgtgccctatatattcaagaaacatgaggaagccagccaatacggctgcagtatattagtgagagaagaaatggcagatgttgcggtgggggtgaattgggggcagatcacacaggccactggcttgtagtgtgagttgtgagtgagatggtagccattagagaattctaggcagataaataacatggcctgacatattgaaaaggtcattgtggctgctgtgttgagaataagctataacggggcaaaaatggaaggagagaaactggttaggaggctactacaatagtctaaacaagagaagttggtggcttgaacccaaggtgaagcaatggaaaggtgagaagtggttggcttctggatgtatttggaaaggagccaacaggatttgctgatggactggatgtgatatataaaagaaatagcagttgagggtggctacaattttttttttttttcaagacatctcgctctgtcgcccacggtggagtgcagtggcgtgatctcagctcactgcaacctccgcctcctgggttcaagtgattcttctgcctcagcctcctgagtagctgggactacaggtgcatgccagcgcacccggctaatttttgtatttttagtagagatggggtttcaccatatttgccaggctggtctcaaactcctgaactcgtgatctgcctggctcccacatttttggcctaagtaacaaaatggtaaaattcccatctactgaaattggggagcctggaaggagggcaggttgttagaaggaggagataaggaattcactcttgaacatgtcaagttcgaagtgttttttggatatcaaagtcgagatgttgagtaagcagctggatattcaagtcttttggagcctaggaaatgtctactctcaggaaataaaagaacaccatcacctggcaagagacagcggagtatgggaagaacactggtggtcaggtgttaggccctgctctgccaccaggtagctatgtgatcctttgggactcctctggcaacgcaggcctctgtctcttcatctgcaaaatgactgctttattttattttattgtctatttcttttttttttttttttttttttgagacggagtctcgctcgtcacccaggctgaagtgcagtggcgccatctcggctcactgcaagctctgcctcccgggttcacgccattctcctgcctcagcctcctgagtagctgggactacaggtgcccaccaccgcgcccggctaatttttgtatttttagtagagacggggtttcaccgtgttaaccaggatggtctctatctcctgactttgtgatccgcccgccttggcctcccaaagtgctgggattacaggcttgagccactgcatccggccccttatctgtttctttgacaaggtcttgttctgtcacccaggctggagtgcagtggcgcaatcatggaggctcactgcagcagtgacctctccagctcaatcagtcctcccatgtcagcctcctgagtagctgggactacagagatgggcaccaccacgcctagctaatttttgtatttttggtagagagggtttcaccatgctgcccaggctggtcctgaactcctgggctcaagcctccacctgcctcggtctcccaaggtgctgggattacaggcatgagtcaccacacccagccaaaatgaccactttagactaggaatgagttgtgttctcagcccctcctattgtgggagttgatgaattaagtgcttagaataaacatgataatatatgtgtatctgagagcattttggaaactgctgagttctacaccaggtagtggtattggcaataagatttcttccttcattcgctgaagtaatacccagtgagtgcctgccatgtggtgggcactatgtcacatgaggatacgatgatggagaagacgaatctgtgccctcagggagcaccgcagacaaccccctgttgtggcttcactgccaagtgcagacgaaacatggggctggagtgtgacattagccagggaaagcttgttcctgatctgggtctccgtggaaacagtgaacgtgcatgtcaaagatgaggcaagatggtaatcccgatgagggaaaagtcatccacttagctggactagggaagagttgggagtggttgggaagggttggagtggtgggggcttcagttccttccctcctccattctttcgttcaacatttacttccttgccaggagcttctcttagaagctcacagttctgtggtagatgaagagtttcatatctggtctcaggagttcaacttagatattacaataagcagaactgaatcaggattcaaatctgagctaaagagctcagttagctatgtaacctagtagtattaatcatttggtatctgtgggcacattctttgttaggtgctaattaggctgaaaggcatgctctccaggaacttaaattataatcactgtaacagaaagtaagaatgttattttcccctaaaagagtcaggtgttaaggaaaacacactccgtggcagtgtaaccctttaactgcatctggaaactgtccctgtggctgtgtttattcttgtgtcatttagatgtctacgtttatatcgtgaggagagtctctttgaccagataagagtataagatatagctcatcctaattgacaaaattagtcacccacaaaattagtttagaggagacatagtcaacatctaccacgtaatggaatggggaaattttgtcctggagagtgaaaaaagaaaaaacaaacaaacaaaaaaaacgaaacctggccgggcgtagtggctcacacctgtaatccgcactttgggaggctgagatgggcagatcacgaagtcaggaattcaagaccagcctggccaacatggtgaaaccccatctctactaaaaatacaaaaattagctgggcatggtggcgtgcaggagaattgcttgaaccaggacccaggaggcggaggttgcagtgagccaagatcgcaccattgctctccagcctgggctatagaacaagacttcatctcaaaaagagagaaaaaaaaaaaaaaaaccacctgcaatacaaatccaagtgcagctgaagccattgtctttaacagatggccctaacctgttttgagtgctgtttcctaaagctgccaacaaacttcaaatgccttttaccctggcagctatcagtcaagatatagaaatgtgatggtctcacaaatcctatgcaattgtctcttttgctggcaaaagtatgaggccagccgggtgtggtggctcatgtctgtaatcccagcactttgggaggctgaggcgggtggttcacctgaggtcaggagttcgagaccagcttggcaaacatggtaaaaccccatctctactaaaaatacaaaaatttgccaggcatggtggcaggcgcctgtagtcccagccactggggaggctgaggcaggaaaatagcttgaacctgggaggcggaggttgtggtgagctaagatcatgccattgcactccagcctgggcgacagagcgagactctgtctcaaaaaaaaaaaaaaaaaaaaaaatgtatgaggcgtactcaggctcctctcttccagttcagaatcagaaggatttgtgatgttggacaggtcattcggggtctcaggctcattatactgtcattacctggaagccagagtgcctcttttctagtgcctctatttgacattcccttagagctggccctctggtgaatagttcatccctaagaaggccagatacaacttgttaccctggtactatctcacttcatcacttcatttgttgggagttcctgctacttttggatggttgataaagcatgagacccatacagttaagataagaaccaaggaactgggagctctttgaggttgtagaactgacttgaggctttgatgttggggatttggcaggggtgcctaagaccagagttctttctctgagatcatcttctcaacccaggaaatactgtcctgtggccacatggagcaatgaaggggaaaggtagaccctgcttaggccaccacttcgtccagacccacccttgtgaccaggctggggacacacatgttgaagccaccatgtcctcaggtcctgtatagacttgctgttgcctcatgctcagctgatcagctttccatatgatgttatagaatggcctccatgaatcacgaagctcagttttcggatgtgcttttgctgtagatcagtaacatggaatccatcatatcaacactggactctccattcctcatgtatggagaatcatagatattcctgtaaccaacaaagggagtacaaagcatgcatttagactttctatttttaattttttatttatgttgcgtaggtaacacattctcaaggctttttttatttttatttttttattgagaccaagtcttgctctgtcgcccaagctggaatgcagtggtgcaatcttggctcacagcaacctctgcctcctgggttcaagtgattctccagcctcagcctcccaagtagctgggcctacaggcacgtgccaccatgcccagctaatttttgtatttttagtagagatggggtttcactatgttggccaggctggtctcaaactcctgaccttgtgatctgcctgccttggcctcccaaagtactgattataggcatgagccactgcacccagccatttgtttttcgtggagtataaaagatattccctgaaaagtcgcccttccatcgtcatcaccactcagtcatccttccacaggcaaccctggttagtaattttaataatttcttgactatccttccacagattttgtttgtttgtttgagatggagtctcgccctgtcaccaggctggagtgcagtggcgcaatctcggctcactgcagccacctcctggattcaagcgattctcttgcctctgcctcccgagtagctgggactacaggtgtgtgccaccatgcccagctaattttttgtatttttagtagagatggggtttcaccatgttggccaggatggtctagatctcttgacctggtgatccgactgcttcagcctcccaaagtgctgggattacaggtgtgagccaccgcacccagcccacagattttttaatgccaatgacattacataaaaagcactgttgaacccgggaggcagaggttgcagtgagccaagatcacaccactgcactcctgcctaggcgacagagcaagacttcgtctcataaataaataaatggcactgtttttacctagccatttttttcattatgttttggagatcttgccatgtcaatatgtaaggagcttcctcatttatgtctacgtagtatggaagtttgatattgatggacatttatgctgtttctaagtttttgcttttattacatgcagagatgccatagataaccttggacatgtgccattttcacgcatgtccatctacctgtagactagatgtgaaattgctgggtcagataatatgtacatttgtaattttggttgctattgtcaaactctcctccatagagattttgccaatatgttctcccaccaccagcaatgtatgactgtgcctgtttctccacagcctcatggacattgctttgagttaagaatatagcagattctgctgcacagtggctcacgcctgtaatcccaatactttgggaggccaaggcgggcagatcacctgaggtcaggagttagagatcagcctggccagtatggccaaaccccgtctctactaaaaatacaaaaaatttcccgggggtgatggctcgtgtctgtagtctcagctacttgggaggctgaggcaggagaatcacttgaaccctggaggtggaggttgcagtgagctgagattgcaccactgcactccagcctgggcgacagagcgagactccgtctcaaaaaaaaaaaaaaagaaaaaaatatatatatagcagattccctgaagatcaacataggatactgaatcatggggtcccactgtgacactattccacaagacaaacaaaacacggcacatcccagtttgaagaatacagccaggcacagtggctgatgcctataattctagcactttgttgaggctaaggtgggaggatcacttgatcctgggagatcaagaccagcctgggcaacataataagacctcatctctacaaaaatttaaaaatttaaaaaaagaaaaattagctgggcatggtggcacgcacctgtagttccacctactcgggaggctgaggtgggaggatcgtttgagcccaggagatcaaggctgcagtgggctatgatcatgccactgcactccagcctggacagcagagcgagaccctttctcaaagcaacaacaacaacaaaaacagtttgaagactactgcattaaaaatatatccaccaggcaaggtggctcatacttgttaatctcagcactttgggaggctgaggtgagacgatcacttgaggccaggagttcaagaccagcctgggcaacatagcaagaccccatctctacaaaaataagtaaatagagatagatgtaagtaaataaataaattagccaggcttggtagtgcacacctgtagtcccagatatttgagagtctcaggcaagaagattactttagtctaggagttcaaggttgcagtgagctatgatcatgccgttgcacttgtagtgtgggtgacagagcaagaccctgtttctgtgtgtgtgtgtgtgtgtgtatgtatatgcacatatatatatccaagaggtagttggacttctggtagttaaaggaagaaaacttcttaaggcagttctccaccttggtgtttatgccagcatgaattagaaaagaagtagattgatgtttttcattttcttttgagacagggtcttgctttgtcacacaggttgaagtgcagtggcacaatcatggctctccaaagcctcaacttcctgggcttgaatgttcctcccacttcagcccccgagtagctgggaccacagccatgtgccaccatgcctggcaattatttttgtagagacggtgtctgcacctgacctcagcctcacattgatttttttaagacggtgtctcggctgggcatggtggctcatgcctgtaatcccagcactttgggaggctaaggtaggtggatcacttgaggtcaggcgttcgagaccagccaggccaacatggcgaaaccctgtctgtactaaaaatacaaaaacattagccgggcctggtggcgcgcacctgtaatcccagctactctggaggctggggcaggagaatcgcttgaacccaggaagtggaggttgcaatgagctgagctcgcaccactgcactctagcctgggcaacagagtgagactctgtctcagaaaaaaaacaaaaaacaaaaaacaaaaaaaaaacgagtctcactctgttgcccagtgaactctggagtgcagtggtgtgatctcagctcactgccacctccacctcccaggttcaagcgattatcttgcctcagcctcctgagtagctgggattgcaggcgtgcaccaccacacctggctaattttcgtatttttagtagagatggggtttcgccatgttggccagggtgatctcgaactcctgacctctaatgatctgcctgcctcagcctcccagtgtgctggggttataggcgtgagccactgcacctggccagacattgatttttaaagcccaagtcagggccaggcacaatggctcacacctataatcccagtacattgggaggccaacgcaggcagatcatgaggtcaggagttcaagaccagcctgactaacatggtgaaaccccatctctactaaaaatacaaaaatcagatgggcatggtggtgcatgcctgtaatcccagctactcaggaggctgaggcaggagaattgcttgaacccgggagactccatctcacaaaaaaaaaaaaaaaaagaaatgggggtctcactatgttgcccaggctggtctcaaactcctgggctcaagggatcctcccacctcagcctcccaaagtgctgggatttcttttaaatggcgcttcttcttttaaaaagaagaaaaaaaaaattgaagaaaaaaagcaatatgctttatgcaaagatgtgttttagctgtttaaaacttatgttagtgcaagtttgtgttactaatttcctgttttctcttcagtgtttagaaacccacagaaccaggcctgttcactaggtttttctgcgtgtagtgaagtatttttctataataaacattgaatcattttactgcaacttttccaaatctggttctgatttgtttgccactcatcttcatcagccttcatccctcccaaactaatgtgtcttttttctcatgagaagttttctatgtttacaaatgaagaagtttctaagtgaagattaagtcataattatttttgctaatcaaaattgaacattcttttcaggcaaatgtttttgttgttgttttctttttttggcttctaaatacagttgccctctgggctggctgaggcagagtacagaaagccttgttccaactgtccagagttctggttggcagaagacaatagaatagcgaacaggtgcctgtagtcagcacagcccagcttgtgtgtggagcgcagtaggtctcaaccatgataaagtggaaaaacacaaaaaccatggctactctttagtttcctatctttcacatcccttatttttctcctttgaggaggcagtttaagcacatcttgattcatggagagacctaaagatccaaagtatctaaaaagttgggagtagtggcacacacctatagtcccagccactcaggaggctaaggcaagaggatcgcttgagcccaggaggttgagtttacaggagctatgatcactgcatgccaacctgggcaacaaaatgagatcctgtctctaaataaataaaaggtttttctaaatgttctctctcctcaataattacaatttatgttttaacattaagaaacacatcgatatattgcaaaggtgaagggttgttttcctgcatcaggaccagtaatgggttaagtttatttaaaagtgcagcaggccgggtgcagtggctcacgcctgtaatcccagcattttgggaggccaaggtgggcggatcaagaggtcaggagttcgagatcagcctaaccaacatggtgaaaccccgtctctactaaaaatacaaaaaaattagccgggcgtggtggtgcatgcctgtaatcccagctgctcacgaggctgaggcaggagaattacttgaacccaggaggcggaggttgcagtgagccgagattgtgtcattgcactccagcgtgggcgtgagagcaagactccatctcaaaaaaaaaaagaaaaaaaattgcagcaaacagaactggatttgctcctagttctgggagagtcaagagtgctcccttctgtcttcactcttttctcaccttccgctctcccagtctgtctctcccctatacacagctcaggtcattgcagagctagtaaaccttatatcctacaaggagaaaacagagcagccaccctcactgcccctctgccctgtctcggagggctgcaggagtaatgagtctgaaccggcaagtgcaggcagaactcacacatagccatcctgaagcagtaacaagcctttctttggctctgcccatgtcattgttgttagttcagtgccagcatgggaggattcagagtaaaccatcattgaaagaaagtacagggagaaaaatggcaatcagggcactggtagatgcctagcagccacaaagcttcctcctcaccctctgcagtcaggctcttttggaaggcagcttcagagattgggaaaggtcagggaacaacagtagcctcttttaaaggtttgtattacgagacttaggaaggaaacgtgaatgagttgaggttatttagcctgtacgcgagaacatgaaaaggagtggaaatttgttttctttgagtctaagaagggttattttgggaagtgtggctaccagctattccctttttccattgcgggtaggccaagaaggtctgggtttaagttacagtgggtgagatggaagttaacccgtattcaagtgttttgagtgctgacggtgtgccagtcacagtgaattagcagaaggaagaagtgcgccagatattgagaagtatgggctctggggccagccagcctggctttgaattctggcttcaacacatagtagtgttggaaccttggacaaggtactatacctctaagcctcagttgcctcatctgtaaaatgggtataatatacctacttcctcatcagttatttttaagattaagagttaatataggtaaggtgctttaaaaagtggctggtatatattaatcacatttatatgtgataaaaataaatattagcatgagcagtagaaaggatcttagggtaatttgggccagcatttcattttacagataaagaggcagacatagagatagaatcgagattagaagccaattctgtagacttctagtccagggtggttgccactagtcctagctgttttaggacttcgtattgcttcaaaagcatttccctttaggttcctcttccttcccctcctcctgatagctggtatttctagagtacaggcatatgtgccctcatttaatcccttacagcaggctatgaagcaagtgccactattatccccattttctcagaagtgacatctgaggctcagagagcctgcccaaggctacacagaagttcagcctggattaaaacccagacctgacttcagagcctgtgctcttaaccacaccactgattttccttagaaagtcccagtggagtgcagttgtgctcagttaaaccatgtgagtatttgacagaggtgagctgcaggagccacagggcccagggagtctgaggatattttgcaatcccttttcaacctatatctgctttgtttttatttttatttatttatttatgggtttttttttttttttttgagacaagagttttgctgttgttgcccaggctagagtgcagtgatgcaattttggctcactgcaacctccgcctcctgggtccaagcaattctcctgcctcagcctcccaagtagctaggcatgtgctaccacacctggctaatttttgtattttttttttttttttagcagaggcggggtttcaccatgttggtcaggctggtctcgaactcctgatctcaagtgatccgcccacttcggcctcccaaagtgctgggattacaggcatgagccaccgtgcccagcctgctttgtttttagacctggtttctcttatgtgtcttctgacacagtgcagttacactaaagcgggttacccaaagaatctacctgatgaagagagtgaagcttgaaggtcagagcagaccaagagaggccaggagcagagctcttgtgagacagggaccacgtggaggttatcagggctctgggcaaggatgctaatagaccagagatgtcagatgtcagaatccccaccttgaccagtggttattcaccattaatccctatcagaccctgatgacagccttggatttccctctctcctggaaaatgcaaaggctcacacaccaaaaaagtattttggagtagcttcaagtttcataaacccccagcttcacctctgtgcttcgcagcatagtaattaaggtcacactctggattaaatggcctagggtgaaatcctcctttactagttagctgtgtaaccttgagcaagttacttaacttggtcttgggcctccagttccctcacttttaaatgaggataatcatagcatttgattgtaggattgttagaactaaatgagttaatgtatgtgacattcctagcacgtggttaactctatagtagtgttcactatataatagtattgctgcccttgcaccttagcccatttagtaaatgtttatggacagaatgaatgaataattctagttgagatgccatgcctggggtagagcattccaatcagcgtgtcgcagttggtctataggtttttttgggtttttcgtttgtttgtttttgagacggagtctcactctgtcgcccaggctggagtgcagtggtgcagtcttggctcactgcaagctccgcctcccaggtttacgccattcttctgccttagcctcccgagtagctggaactacaggcgccctccacgcccggctaattttttgtatttttagtagagacagggtttcaccctgttagtcaggatggtctggatctcctgaccttgtgatctgcccgcctcaacttctcaaagtgctgggattacaggtgtgagccaccacgcccagccagtttttgttttgtttttttctttttttttgagacggagtttcgctgttgttgcccaggctggagtgcaatgacacgatctcggctcaccgcaacctctgcctcccaggttcaagcaattctcctgcctcagcctcccaagtagctgggattacaggcatgtgccaccatgcccagctaattttgtatttttagtagagacggggcttctccatgttagtcaggctggtctcgaactcctggatggtctataattttgccaagatattgatccgctcgcccctcagggctgtcaaagccccagttggtcgcttctggcttgaagcagtgacatctgcaatgtgaacttctgactttaagcagcagcatctgcaatgcaatgtacaaatatctgtctctctaggtcccctgacatgaaaacagtttgggtagcaccagtcaaagatatcggttggtaagtcgtgagaatccagtaggcagtccagattccaagtccaggagaattttgagaatggatgtcaaagagagtcttcacgactgcactgagtttagaggccgtgggcttcctgcaggcttcacaagtgttggggtccactgctagagcaggctgcacaccacagtgggtacagaagatatcctgccagcaggaagcttcagtgcttcccaccttgcacatgagggacccagggagtcactcacaggatgtgtggagagcccacagtgtgagttgctggagaaaccactgtgacgcagaaaccaggctagagcccaaagccttgtgtaggcaacggacattaaacagatagtgatgagtactgaagtaggttgagcccagaggtgtgagtgctaggaaaaggtggtacctaggctgtgggagtttataacaacccagccttgtatgcaaggtggactctaagagctgtaggaaactatggaagggttttagtcaaggaagtggtatgtttagatttatactctttttttcttataaatctacttttatttatttacttttcattagcttaagtccttgaggggcacagcgtcacacagattctgtgttcaatagctttagcaagattgcttgggaatttagcacaaaccatgccactgtttccatgggcctgagtttacctttccccagattatgctggttttcttcagtttgctgccagcagtcagtgtgttgttctttgctttatacatgtaagtacatctcttgcctaaatagaattcagtttcatttcgagcataaataccttcaatttttttttttttttttttttttttttgggacggagtctcgctctgtcgcccaggctggagtgcagtggcgcgatcttggctcattgcaagctccacctcccaggttcatgccattctcctgcctcagcctcccaagtagctgggactacaggtgcccaccaccacgcccggctaattttttgtatttttagtagagatgggttttcaccatgttagccaggatggtctcaatctcctgacctcgtgatccactgtcctcggcctcccaaagtgctgggattatagtcgtgagccaccgcacttggccaatacctcaattttaataagagctgtgtcctcgctttggttctggaggccccacttacagctagcaaaaaatggccttggactacagccttccaaatgtattgtatttatcttattattatttttgagacagagtctctttatcacccaggctggaattcagtggtatgatcaaagcttactgcagtttcaaattcctggggtcaggcagtgctcccacctcagcctcttgtgtagctaggattgcaggcatgtgccactacacctggctaattttttttttttttgtagagacaatgtcttgctgtgttgcccacattggtcttgaactcctagcctcaaataatcctcctgcctcagcctcccaaagcactgggattacaggcatgagccactacaccctgcccatatttgccttttggaagtcctgttctcagcaggcctctacaggctccaagatagtgggaagagagctttttttttaaattcaccctgacagcataaacatgaatgttagaacatgagttggaagaggctgaggcaggaagatcacttgagcccaggagttcgaggttacagtgaactgtgatggagccactgcactccagctgggcgacagagtgatactttgtctctaaaaaaggaaagaaaagaaaatgaattggaaacagacaaaagtttatctgaggacataagttataaggctccttatagttgtccagaggtgaaaggtgagacatgcctgaaataagtacctggacttttaagggaaaaggaggactcaagcatgatcccccccccccccgccctgaagttctgggtggaaggcgataccacccctgggataggggatactggaagtacaatagttctggaaggttgggacacattgtgagttctgttgaggacttattccacgtgtggtacatgtgggatgttccctgaggatggttaacaagctcagtagataaatgggtccgagcacaggagagatgttggagtaggcagagagaaccatcagcagtggggttaactgcctgccttcagcagggctccttcctaaggggagaaagtttagaaatgggttttgatcagtgatttcttactttatgaccagtttgattggcatgcttctcttctatgcttaacttttagaattcttagataatgtgtattttgagcccttttcataaaaaccaatatagttcactactttgaagaattcatcttttttcttcttggctggctggcctcattaactccttccctgagtgtctttgcgataggagaaagctggttaactcataatgtgatactgtttattttcttagatttgtgacccagaaggaaatctctgacctcagctgtggctcttggtgctggccagaagccaacttcatgtctgagtgcacgagcagcagtttgccatggagagcttggggctgcacacggtgacccttagtgatgggacaacagcctacgtccagcaagctgtcaaaggtaagtatttctggggacctcaggatcctgccctgtccctcagcctctggaaaggagtgtccatttctaagagtcccaccatcaccttgccctcccgcctgcttacccttgcccaccaccacaatttgctctgcattagaatctcctgtggtgcttgatgaaaagggaactctaaaataaaatgctacaagtcagacaatcccagtcataggaaccaatacctctcaaagacagaattcctaatatgtaataagcagttgataaatatttctggaatgaacacagtgttagttatgactccctgcttttcagatatcccctgtcacagttttttagtgctttctagaagcagtttatcatcttaattcaagtatattcaaacattcaaactactaagcatctgccatgtacaagatgctcttttaagccaggcatagtggctcatgtctataatcccagcactcagaaggctgagatggaaagatcacttgaggccgggagttggagaccagcctgggcaacatagcaagactcttgtctctaaaaaaaataataaaaataataatctgggtgcagcagcatgcacctttagtcccagctattcaggaggctgaggcagaaggatcactgaaacccaggagtttgagggttcagtgaactatcactgcaccactgcacaccagcctgggtgacagagcaagatcccatctcttaaaaaaaaaaaaaaaaaaagatactcttcctgattcagagaggaacacccaagcagagatctcatgccctaatccccactaggggatgccagaattgaaaatataggacatgtagttaaatttgaattggacgtaacaatgaatactcttgtaggatacatacatcccaaatgttgtagggacgtatgtatactacatactagggacatacatataccccttataagggatagacatatataaatgtgggattaagctgggcttggtggcatgcacctgtagtctcagctacttgggaggttcagatgggaggatctcttgaggccataagtttgaggtcagcctagacaacagcaagaccccatctaaaaaaaaagtagggggtgttaaatactataaaatactaaaataataataccaagttctaaaaaaaaaaaaaaaagtattgtttatctgaaattcagatttacctgggcatcctgtattttatctggcaattctatccttacactgaaggtacttaaaatcaaggtaggtgtggagtcagaataaagtgtttagggcaaggcctgcaggccagggacacttttcctttcttgccagtgttctcaggcagccagatagcattcgtgtcttccttggacagcaccttgaacaaggcaaatactgccttgttcctactgttcatttggcgttttctggactccatgattgtcactgtcctcatgaagcactgtcattgcaacattgccctcctttatttcaacacactctcagaatatatttctgctcctaagtttacagataagttgtttattgatttcattttaagttgtctgtttcctgatgatgactaaggagtccccttaatctcatcagtaagcactttccatatgacagtgtgtgggggtcccttctggaaaggtttcttgtcaagagctgtctgtgacatgtgggttcttgttgggttcatcttcttgagaacgcaacttctctagaatgcttttgaagcctgaaactctctgtttgcagacttcccactccaggtcttgcccctccagtgcagtctccatgggatggaagaacttagaactctagctagggttgtgtttactccttggacccagttagttcccgtgcctcagtcttccactgagaattaatggtcaaacaaatgaataaaaagcaagtgaccacacctgacctgagagagccactctttccttatatctatccttcttacgtatttctttattctgtcagtcttcctggctgttctttgcccactctgtagtgttgcagtgtgcacttacacacacacatatgcaaacacacactcactcacaacagattttccctctgctcagggtagagctctccttcagagaccagaaccacactttcctgaaaggcttctctgacttctcctctgaagcttttgactgaggcatttttgtctctgtctgctggaagccctaaaattgtaagagacttatctttaattaggatgagtataaaatgtattattcaaacccagcattttaaaagtggaagaatgtgctattaataaatgcactaggactgttccaggcaaactggggcgtatggtcacctctctgtaatgggatatgaggcccttgtcagtcagctgttctccccactgcctctctccattgtagtctctggttgtttgaggaaatagtaggctaagttttttcttcagacaactcttctcaacattttgttttctaccttgaagcagtacccactctgctggccgtagcttgctgatgctttcagaaccccaagtactgatgcccttgccaggacagataaattgttaaaatgagggtagcctactgctctgtgggtgggagggaagaaaatgggttcatcttccccccatctcagctgcctttcctatttcttacctttatctccaccttacctgcctttggttagttgtaggactgttagttactgaccccaagaagactcagtttgggagcaagtttggggattcctctaaaggggagacgtcagcagagacttgggctggaagtaactgtctttcccacctgagcgctcagtttcctaaacctcaatcttctaaggaaaggacaaatcacttgtcattaactttttttttattttttcttcctttttttttttgagacggagtctcaccctgtagcccaggctggagtgcagtggcgtgatctcggctcactgcaaccttcgcctcccgggttcaagcgattctcctgcctcagcctcccgagtagctgggactataggcatgtgccatcacgcctggttaatttttttgtatttttagtagagacacggtttcatgatgttggctagactggtctcgaactcccgacctcaggttatccgcctgcctcagcctcccaaagtgctgggattataagtgtgagccaccacacccagccttacttttttgttttttctttttgagacaggacctcactctgtcacccaggctagagtgcagtggtacaatctcagctcactgcaacctccgcctcccgggttcaagtgattctcctgcctcagccttccgagtagctgggacgacaggtacctgcctccacacccagctaatttttttgtatttttagtagagacagggtttcaccatgttggttaggctggtctcaaactcctgacctcaggtgatctgctcgccttggcctcccaaagtgctgggattacagatgtaagccaccgtgcccagcctttttatttatttattttttatttttttcagacagggtcttactctgtcacccaggctggactgcagtggcataatcacggcttactgcaacttctgcctcctgggctcaagcaatcctcccacctcagcctcccgagtaactgggaccacaggcatgcactactacatccagttaatttttgtgttttttgtagagacagggttttgtcacatagctcaggctggtctcaaactcctgagctcaagcgatccacccgccttggcctcccaaagtgttgggattataggcatgagccaccgaatctgaccatcattaactcttcaatctccctttctttcctttctcatttctcttcttccttccccctctgtcagactcactggacacaaggaagggtcgtctagttctaatttcaagagccttattagaagtgctttccagtaaggtaaaggaagagtaatatcttaggaaatctggaggcttgttaatttttatgctgcttgttgtgttgccttaggtgatctaattttttactagaaaattgaaatgaaaaatgagaggtcaatgaaggaacattactcaacagtggcagtggaataagaccttcatggacacataatagcataatagttgtgctcacatagttctctattgctttactttccatttcttctaaaatgcatattgggcttataataaaagctaggatttattgagggctgaccatatatacctggcactcttcccagttttttatattcgttaactcatttaaccctaacagcaaccctataagagacacagttttcaatccccattttaagaaaaggaaactgaggcacagagaggttagttaaataagctgtccaaggtcacacagctgttaagaggtagagctggaattcaaactctggaggcctggcctggttccagagtctattgtttttaaccattaagctatatatcctgccttcacaggggctcctggtcttagcacactgtcatagtgagggatgaggggatatgttttgattttgttagtttgagctatatctgaattttgacccactggggctcatccaggtttaagggccattagttcaagtctcagcaacttactattaggttggaagtttccacttggctgggcatgggtagaataataagtgaagttattcctcctgttagtaactggaagggaatctgttgggaggtgatgggttccggcaaggcaagtgtcttcacccttagtgtctcaaggcccaggcccagggagacagagcaagggaacaaggaagatgttacccatgcttagacctgcaggctcgtgcctagagactcaaataagcctcagctaaaaacaggcaggcgtttcttagccctcttctggtcctggcccatttctctctatttccactcttaacaggagagaagcttcttgaagggcaggtgatccagctcgaggatgggaccaccgcatacattcaccaggtgacggtacagaaaggtgagggcaccccaacacaccatgccttgtcgagggaagcctgacagcccccaccaagggacccctccatggcactgagctccagggaaaggcaggcattgctctcgttacagaagctctctcctttgaggatggtcagcctgtgcagctggaagatggcagcatggcttacatacaccgcacacccagaggtagggtcaccatcatcacaactcggggaaggatgggaggcaggactggaggatggggtggcaggactggaggatgggatggcacacaactggggtgtagacatgggagctgtcatctccatggtacacacatgctcacctggattagcagccttgcccaccttccctggtgcagaccacaggagcagctatgtctgcaactgggaggtgagccttggagatcagtgacgtggactttgatggtggccttggctccagcacagccacaaagtcttagggctttaaataggacccgaggatatcatccaagaccaggaaaaaaaactaatattttagaatgaagctcctaaggtgctgaagaataacaatttattccttccgcaggtggtttcttgagtgactgttgcatgcctggcgttgtgttaggtgtgcagtatacaagacagaacaaagtcagacacagtccccgctctcctagagtctagagggggaaacagaagtgaaacaagccatcagtgatgaactgatcattacaaacagagatcaggctcagggagggcttctctgaggtagtgatgcttgagctgagaggtaaagaatgaggtagacttagctgggggaagagggatggcagggagggttcagtacttcaggcagaaggaatagcatgtgcaggcctagagctggggggaagaaagaacagcacattccaggaactgctaggagctagagccctgggagtgaaggcagaatgagcaggaggaaactggagagagaaagacagggctggtgcactctgggtttgagtgtcagggtgaggattttggtctttatcctgagaccagtgggaagcatttaaactgttgaggcagttaagtgacatggtcacatttgtgtcccgcaaagatccctctggatgttgtgctgcctggagggaactagagggggtgaggagcgactggtcaggaggctattgtggtcatctaagccaaaatgatgatgggcccctgtcaggtcctcaaggagcttgtgagttcccatttagtgtaccataggagacctcatccttaggtgagacagctgcagaaggagggccagcaagagtgaatcacaaagtgaagggccatgagaaattggatgttgaaaccctccttggtatatgtatctctcattaacttaaagctagggtcccagctgtatctcttccccttgtgtggcatcagggctaaccgcgtgttccctgcagaaggctatgaccccagcaccctggaagccgtccaactggaagatggctccactgcctacattcaccaccctgtggctgtgccatcggagagcaccatcctggccgtacagacagaggtgggcttggaggacctggcagcagaggatgatgagggcttcagtgcagacgcagtggtggccctggagcagtatgccagcaaggtgagcacgcacagcgtgacacggtctgtcactctagacaaccgggcctggcctgcgcactgcctcttggccctgccagaacttcacctctcaagaggacaagggcagccctgtgcttgggcaccatgtgggatattccctttgcccctccaccccagctcccccaactcacctgtcacacatcattgtctagggcatgcaacacagcctggcctggccgctgacagctgtttacgctcacttttgtttacgctgtctttgcagagggaaagctgccataagaaacagtggcatccttatgctgaggagttaggcccagcttcactttggctgctgtagtaatcctctgcactagctgggaaagccctgccagtgacttgtattagctttctagtccactgaggtaattgtatttatttcttctctgtgactcagtcatttggaaaattaacctcagtgggctatgacaagggcatgtgcaacagaacagctgggattcctggattatgaggcccacacagtagctcagctggaaaggaaaagggtcctggctctgcaaataccagtcagtccaagttctttctgccgaaaccatggtcctgcatgtggggaaaagggtacagacatctctgagctttccaaaccagggtgttcccttcctggaatgactacagagcctcaggctggatgtgccagggcttcctgcacgttccttccttccagcagttttacccgaagatgggggaggttttttatttataatgaaaccagtgtgactgaatgatggaggaaaaaaggaagtcctcatgtcttttcaaaatgaagcacaggccgggagcagaggctcacgcctgtaatcccagcactttgggaggctgaggcaggtggatcgcttgagtccaggagtttgagaccagtctgggcaacatggcgaaacctcatctctacacaaaaatacaaaaacaaattagctgggcatggtggtgcgcacctgtggtcccagctactgggaagcggaggtgggaggatcaggaggcggtgactgcaatgagctgagattgtcccactgcactccagcctgggcaacagagggagaccctatctaaaaaaaaaaaaaaaaaaaaagtcacaaaactttacagtaggctacattcactcccacccaggttccctgaggtatatcttagagaccaaatttgagactcgatgttgatgtaaagagaagtgggttttatttaaatcatgagccctgagatctatgcttgctctacctctacctagtccaaacttgggtgagtccctcctctcctcgacctcagcttattcctaatatgatgagatgggaccagatgatctcagaggtcacttccatccctgatgtcccttgattcccgtgattaccccaggagctagtgagacatggaatgaaatccaagtgcctgtgtgggttagcccgccaagcaggtcaggccacctctgaccctaccctctacccagaagctgtttaagtgtccgtgaagctctcagctgcttgagcctctgagctggagcctaactagacagaccttgccatgaatttggcctcacccctctgtcccctgctcactgtaacttgtagagttcagtttcaggagctcctggaaagaccagagtgtgattctgaagcattctagaaagaaagactaagggatagtcccaccaggaccctgcccaggaaagcagaagagcaataagggctccctgcatccagaggctggtgtgagatgggtggctttagcaatatcccagaagaggagacaaaaggggaggacttgtcagctgggtgctgtcattagagctgacatttctggtggaaactgcagcactcccctgggtgcttctggtcgtggccacctcactctgggccccaagtcctatcagatgaacctaggtgagctcatctccacagcaagcccccttgtttatgtacttttaagcactagtttcgtgccaggaggaaggggacccctcccatcagaagatggaggtcttgagagttgcaggctcctaggtgtgtgtgcttagaaggagggtttctggcacttggtccagttcaagcatggccattcagacaacctcccttttcaccttacctagctgtctatgtgatagcctttcttcaatagccgtcacagccactatgacctgtaggtctccctttatcccatcagagatgggtggtgactccccatgcccaccctgtttcttctgtagcatgccccagcatctgttccttgtccgtctagttatgttcttctgccccagaggcccctgacaggtttaaccctgcctgttgggtcttaagctgccagcagggccctgtgtcccaccttcttcactggggagaatacatatagggatctcaagacttttcccccaggttcttcatgacagccagattccccgtaatggaaaagggcagcaagttggagacagagcattccgctgtggctacaagggctgtgggcgtctctacaccaccgctcatcacttaaaggtaaggttgctggcagacagccgtcagctctgcagtcttccctcccaggctgtaattctacctttctgctttgattggaattggtccctgccctcacgttgctggagggaagaaatgagggtacacaggaatgccagcacagagcgcttgacacacatgaatggtacaggagggaagagaatcagggtcctaaagaaaaccaaagagccctggtcatacccttgctcctctgaattatgtgattgcttgtcctcacaggtgcatgaacgagctcatacaggtgaccgtccatacagatgtgacttccccagctgtggaaaggcctttgccacaggtaacctgcctggtgggctgcttccagttgagggtggagggttctagttctgtttgggacctctctgaagggaacccaacaccaggctgctttcctggagaaactaccgtcagagtactctgacttgcagggtgctctctctggaggaaaccttgttacgggagtgcaaggcagcatggttcaggccagcagaaggagcctggagggttggtggagagacccagcctcttgtgtcagctctgatgccaaccagctgtggattattgggtgggccattgcatctctctgggcttattttcccctctgtgaaactagtacctttagccatgagttctctaagtttcttttcatgctcatgttctggtatggctccaactgctcctggagagggaagcagggcagagtgggcttttccagcccctgcccagggcaggggtgggatagaggcagacatgggcttcttgagccaaaggaggtggagagcctgtgcatgaggtggacggtggaggatgagaccccactgggtgctcatctcaccccctgcctgccacatatggacaggctatggactgaagagccacgttcgtacccacactggtgagaaaccatacaagtgcccagaggagctgtgcagcaaggccttcaagacctcaggagacctgcagaagcatgtccgtacccacactggtatgctgggccctgcccactccaaccccattccctgggcaaaaggaattcagcttgcctttcagacttagacctggagcccagtgccatccccagcttgctccagcatggccctctttcccacacccctcctcacatcccaccatttgcataggtgaacgcccgttccagtgcccttttgagggctgtggccgctccttcaccacatctaacatccgcaaggtacatgtgcgcacccacacaggcgagaggccctacacctgcccggagccccactgtggccgcggcttcaccagcgccaccaactataagaatcacgtgcgcatccacacaggtgggctagctggcatgcgaggactaccctcactcaggccccaacccctctactgtaggcttcccatctaagacacattcccaactcccagcccagaacccttctgtgccagccattccaggctggtctggcggtagggtatccccagaacaactctgcttgcagtgagtaattcctcaatttccagttaggtccaatctgaaaggtattgccagtcctctctggggtccctcagctccctaccacccctctacacccaccctgagttctccaactctgactgaactcttgaaaagaggccagggtcaggaatgatggggaagaagcagagtgaactgtcaccttcaactcctcaccttatccgccgtccatgactcctgtgtatcctcaccctccccagtgttatgcccctcatccagctttctgtgttgtgtctcagcatgtgtgtcccctctttcccatcacaactgatacttcagtcatccttgcctcttgcctctgctgttcaccattctcaacctcccaccctcaaccttataagccccagtgccccctaccagccccttcactagccccagccttgccctgtcccccgtttcctttccgccttgtctctggattcagtggttcaacacctgtgtcctctctgtgttccactggccatcttccccaaccctgtccattcagagtctcaggtctcagtccctctccctccctctggctctcccttcaccaaccctgtccctcacccctgtccccttagtttcccccttgccagccccagttcccacccccctcacagcccagtgtccccaggggagaagccatacgtttgcacggtgccaggctgcgggaaacgcttcaccgagtactcgagcttgtataagcaccacgtggtgcacacacactgcaagccctacacctgcagcacctgcggcaagacctaccggcagacctccaccttggccatgcacaagcgcagtgcccatggcgagctggaggccacggaggagagtgagcaggccctctatgagcagcagcaacttgagggtaaggggagtgggcagagggtgagagtggggacaagccaggcctccccatggcatctggtagcagatgtcagccttggctctcctctcccagccgcctctgcagccgaggagagtccgccacccaaacgaccccggatagcttacctttcggaggtgaaggaagagagagatgacatcccagcccaggtggcgatggtgactgaagaagatggggccccccaggtggctctgatcactcaggatggtgcccagcaggtacaggccctggagggcagaggtgccatactagctggcactctccactctctctggggactctgggagccctgaagttctgacagccccactgccacccagcttcttgtttaagttttatagacttcagaggctgaggctgaggagaccacatcttgcagcacagcctctcctcctcctgtgcttccagctcagtctctggggcttctagagcacagttagtagtttctctctttacttggaggctgacaggtcctgttcatctgaacaggatatgggatgtccttctcaagagaggcatgttcatatagcagccagaacatggtatggggtctgaaagcctggggtctggtcctactagtgtactagctagctatataacctgacccttgtccgtacccttgctagaaagtacatctgtgctttctagagttgttaggacacaatcaggtggcgaccctgagctggatacaacagggcccagaggcaaagtggtgataaatagaagtagtcagtggaattcttctagtgtggcctctctttgcaaccttggacccattttgtttgcctgtcacccatcccttccaccactatgacatgaaactaataagctgaccttgtctgggagagcaggtatatcttccttagggactttcagacaaccctccactgacactgccagctcatcttcccctcctgttggcaggtcagcctgtccccggaagacctgcaggccctggggagtgccatcagtatggtcacccagcacggcagcaccaccctcaccatccccagtcctgatgccgacctggccacatctggcacacatacagtcaccatggtcagcgccgatggcacccagacgcagcccgtatgaccaggcggtttgcttggggtttcttattttgtcattcctttccatggggcgggcattaaagtgcagcctaaactagtcaagtcttcttaccaggacaaagattccccacaaaagaaggggtcttccccacagttcctgggccatgagcagctcttacctttaaaagcagttgaatggaggtcaagagacactttctaaatctcaattcaaccctgatttgttgtgcaaccttaggcaaatcacttttccatggacttctgtccattttcaagtgaggggattaaaatatctttggaattttttacagctctgtccttctgtgattcaaaatccctaaattaaattgggctctaagttgggaggaaacccagccttacttagctctgagcctcaggctaattaatctgacccatacggttttatccattctcttctgggttgttcccagcaccttaattggagggatgtttatttggattgtggggagggagagtatactgcaggtggaatggaagacctccttttgtctttcaggtcacaatcattacctctggggctgtggtggctgaggactcaagtgtagcatctcttcgtcatcaacaggtggcactgttggccacagccaacggaacgcacattgcagtgcaggtgagtagagatctgggaggaaaggggatcccacggccagagaagtcaacaaggaataaaggggaattagatgaggatcttgaagagaagggcatctgactcaaaaagagcccatttcagaggacagatccctttcctcctgcatccatgcatctgtctcaggctcgctcttggctgaggcagaatgttgaagcctcttctggccttcaggataactccgatggcagtccacctgtggtccaagcccttcatcattttgtgtctctgtttcttcatctggaaatgaaggaggctgacgtagatgatcaccacggttctcttcagccagtccttcctccgtgagcaagtgggtctctctgaccctggctattccagggccccctggccatgcctagcctaataggactcttcatccgtgaacttcatgtttattggagccctactaagtgctcagcgtgtggcactgggtagatgggggagagtcaaaaaaaaaagtaggccacatattactaacactggaatctagcagggagggtctcactgtctccttccttctgcacccccttccccacagctggaggaacagcagaccttagaggaggccatcaatgtggccactgcggccatgcagcaaggggctgtgaccctggagacaacagtgtcggagagtggctgctgagtccaagagggctgggtcccacaccatgctggaggaagtgccatctgcatggccactcttgcccccaagggcccaggctgtggctgacacatagaaggtggccacataggtctctggggtgagaagacagcaagaaaactgcctaactgaagggaatgggggccctgctcaagaagggggccaggcagctggaatcaggggagtgcatcatcctcgggagctgacaacagccaggctacaccagggcacccgcctctcaaaatcagctgggcgcccactctcctcctaaagaacacccttctggccctcagtctgttccccttctcaggtagagattggggctgctatggggactggccctgtagggttgagccacagacagctcttcagcccagtagcagtggagcaggccctgtcctgccctcccagcaataaccacctccctggaggccagctgagatgcctggctacttggcaccagggacttcctgacaccacagtcaattaattcctcaggggcctgtggctggagaaaaggtgcccagcccccaccactcctcagctgccccccaacctctctatggcagagaggcagggagtggccctgtacatagactgctggggattgggtttgatttgttttgtttttttaaattccattttgataatttttttcctgctctgggtggtggtggcacatggatgaatgagtatttaataaaagttccaaatttccacctgggtccctccatcctttcagctctaggcccgggtggcagggttggtcaaatcaggctatcagccctgtctccctggcacaaaccccactcagccttggtgccagagtggtggggctggcctgccagggacacaggtgggaaggaagcccagtataagataaagccctgaggagctgctggtggcttcttgcccacagctgagcaggtgggctccagggtagccaaacaggaccagggtgaccgctgcttccaggctctggctgagtctcaggcctcatgtgattgagctgggggaactcttttcctgccttttcttgtgaaatgtagtcagagcccctccaacccagccacccccaaatcacacagtcagcttctccaagagggcaaagccccaggttagagtgaggctgggggacacctttgccaaggttactgagattcaaggagcagagtctgatgcctctggagctgaagtcttggctctattacccagctctgggggtgcccacctaggtgcctaggactgtgctgtgggatttcaaagccacaatcagaccccactgaaaagtgagttggtgagaccagatcagctccagggggaagaagggatacaggggaaggcacttgatgggaagaagctctgggtttgactctgcctacacaggaacattgcagggattggtggtgcctcttttcctctctctgctgtgatggatatgccccaaccccttcctgcctcctaggattggaaccccctcctctgatccaggcatcctctcccaggatgcctagaaagctcccatttactcttgccaccagctccttgggaagagaggggcgggggcgtgcttccaggcaggaggtattcccagcaccttacttggagggatttttatttggcttagggggtagggggaggtgtcttagaattggcctgagcagatgtcttcaacatctgtgaccaccattcctggtgtgggcgtgtcccagtccttttggacactggatctgaagaaaggaagcactgacatggagggccctgaatcccaagcctgctgctgctgggacccttaaagttgaggtgcaccacaaggctcacccccatgtgtttcaggaagtttccagtgtcttcagggctactggggctagagtgggcagtgctctgagtaccgtttagagccagtgctgaggggatagggagccagcaagtcaagtgccacatcctgacctggagaggtgccctggcccatttccttctccagctttgtgatgttgcctttgtttccttccacttggatggagtcccaccaccatggtaatgttaagtagcaccaaaagctctacccagagcctactatgtgctttacgtccattctcagacattcttacaacacggaggcatttttcctgctttacaaatgaggaaactgctcaaggaggttaagtaacttacccaaggcctcctatgttgaactaggactggacctttactctgtctgaccccaatatcaggatgagcttgctttttccctcagcaagctgcgtctgggagccctggaaggctccagaagcctccgggtctgaggaggcttctaaaagggcctcacatgccccgggagccacgtggatacagaacgagggttcccgctctcagagagttggtccccagttcccatgcagggagtggagcctctgagcactgccagaacaacaggcagggttctcgacagcacagagcctcacgcaatgtgcaggcaggtggtgctctcgctccaccacggcacctctgcggtctctgcagccgtttgcatttcctgaaaccggatcttagtgtcagagccgcccccagccgggcgggcgcctcagccatggccctgcgcaaggaactgctcaagtccatctggtacgcctttaccgcgctggacgtggagaagagtggcaaagtctccaagtcccagctcaaggtgaggggcacccgggacccgggggaggacggcagatgcaccacaccagcccctgccgcctgggagccaggtgtggacactgtgccactccaggggcacccagccatccagcgtcccgggcctggggtcggggggctggtcctgggtaactgggccaacgtagcctggtagatgccgctgcccaccctccagagacctagtgaagtgtgtgcagaaaccttgcgcagaactgggccccacaactggaggccaggaggttctgagggccattatggggttctgagggccaggagccaggccacatcccagactctgtgtgatgagcacacacacctccacagagtcatgcttgggcacgcagtgtgctctttcttgctgcttcctcctgactttcaagagaaacagttagccagtgcttggcagtcatttcctctggagctgagagaggcataaaggggccgcccccagtcccaaacctgtctggcctgtctaaccctgccccccaggtgggacagagctgcggagtgggtgaggactgaggaccctattatactgctacgcagctcacccccctatccaccacacatatcaggttgggaaacttaccttaggccttgagacctcaggtagggaagggggagaatctaagcccaggaaaatcccaatcaatgattgtcctgaagtcaatcatctggcctagacaatttctgggaggccaaggagtttttctctctcttcctctagtcctccagtagtgctgccttccctaccctagttagtggggaggaagcaaggccctcagccactagaatcagcgaacactgggggaaaggagcaaggtaggcctcagctctctaggacctgccataggggtgccttcgttcactctgcaagtacttgagtgcccctcgtgaggctctgtgcctggcatgtggctaggcactaaactggtgtctccctgccccatcctccaaaggagacgtgtggtctcaaggaaacctccattcttaatgaccgaggtagagggtgctggatacctgagagatgaatgggacagaacagttattgtgccccaccaccgttccaaccccctactttactgaacttggatgtgaggaacttgaatatcccaaactggtcctatgttaaattccttacctggatttgtgagcatctaatagatgatttcactcccccaggaaggagagcccactactatcttttgtcacctagggagaacctcctaacaggcagattcttccttacatcctatttaaatctcttgtattgcagatcatgtcatttggttgggtcctcagtataaatggaaaaaagtcgatcatccaaaatccatttctgcaaactctgtgtcccacccctacctcccaccctgtccctttaatatcttgccagacaataccagcccccgtggctttttgcttccagggtaacattttccacttctgtattacctgtggccactgagacctctccaggctctctctgcccttcacatggaaagtacagcctttaagtggctccccttttcctggtgccatcagccagtaaagcctcctagcttgagcctctgtcttgccctctaaaagggccactacccactccctcatccccacaggttgcgtatttctagggaaatactccatggagagcttgcatgcttgaactgtccactgtctgtacctcatcacagctcatattgaacctactgccagcaacatctctggtcacacaggatcaattatagagttccctcctacttgacagaaaacttgtcaactctggaaacctgggctaacaatgggagtctcaggggccaagtgggggtggggcggaaatggcggggctcctttcaagcccataatagtgaatattggaagaggaggaagtagtgatagtgttggggggcggggattccagcaaagcaaaggagtaatagagaagtggtcaaaaggcaaaggaggaagtagacgagagagttatacaagcagggcccacctctccccagaaaagacttggggatgagggaaaagaccttggagtcaatctggttttttgttgttgttttagagatgagatcttgttctatcactcatgctggagtgcagtggtgcagtcatagctcacgacagcctcaaactcctgggttcaagcgatcttcctacttcagcctcctgagtagctgggactacaggcacatgccaccacgcctggctaatttttttattttttattttttagagcctgagtctcattatgttgccccggctggtttcagacttctggcctcaagtgatcctctggcttctgcctcctgagtagctggaattatagtcttgagccacctcactgggctggttactaaaaccatccctagcgttagggtcctgggttggaacctggcaagagacctgcactagcccagggcaagatgtgtcggtgcgtgacatttgccacttctcccctaatgtgttggtagacgggctcccagtggctgtcctgggcaaacccacgatgaggccagagggtaggaggaagaacagcacgtcctctgagaaaagcccaaggagtagggttgtttctcctggaaaagagaaggcttgagggaaaaaccagatacttctttctctctttgaattcttgtagaaagtacaatggcttcatccagttgggttgagaacagagaaagtaaaccaataggaatggcactcctgcccaggatggatttaggttgaacacaaaacttcccaggagttgagggctgtgagttcttgcaaggttcccaaaaccgcctctaaaaacctttggaaggtagccatcctgacagagggctatagagaggggagcccttgggaatgatgtgtgtcctactgaacacaccctcttacccaggggagcagttttgattttagaactagtggaggatcagctgataatttggcctccttccccactgactatcaggcagtggggtgaaggggtatgtagatggagcagtgtgtctctggtttgatgaggatctttgggtggcaccaggcctaccacttcctccttgactggcaggagctgggggaagggagggagggtagacaggggccttccagtctcctgcacctccagctgatattcagggcagtcctggagcccagagtgagactcttgcccactgagaatcaatgagcttcaggttttgcctcctctggagagggacaaccaccttctccttagtggaggaaaagttaagaacagctccagtccaaaaacctgctggctggctaggatcattagctttgtcctgacccctgtgtgctactggtctccccaggctaggatttgtgggtagggaggggaggatgatttaatgatgtgcagagcacttgactcagaaccacgcaggcttggatccgtactgctccccatctgggtgactttaagcaagtcactgtccatcttcagtttctcatctataaaccagggggttgatcaccaagctgtcctacaaaactaaagaataaattctgtacctcaagtaggtaaaattggtctatgatgcagcctctcctttcccttaactgggcctctgtctcctttgatgcccacacccaacccctacagccccttcttgctctcagcaggtgacacagctaatccaaagattcccaccttttaaaatttccagtgttcctccatgatagtagttatgcttttctagtaacccactagaatacatttggtaactcttaaaaggagctgtgtctttttttttttttttttttttaagacagagtcttgctctgtcacccaggttggagtatagtggtgcaatctcagctcactgcaacctccacctcccaggttcaagtgattctcctgcctcagcctcccaagtagctggaatcacaggtgcccaccaccacgcccagctaatttttgtatttttagtagagccggggttttgccatgttggccaggctggtcttgaactcctgacctcaggtgatccacctgccttggcctcccaaagtgctgggattacaggcgtgagctactgcacctggctggatctgtgtcttttaaaaggatcacttggaacctagattcatttaaagaccttgctgggcaaggtggctcacatctgtaatcccagcactttgggaggccatggcaagagaatcacttgagtccaggagtttgagaccagccctggcagcatagcaagaccccaactctacaaaaaatgaaaaaaattaggcatgatggctcctgcctatagttcctgctactctggaggctgaggtggaaggatcgcttgagcccgagaggtcaaggcttcagtgagccatggttataccactgcattccagcctgggcaatagagtgagattctttcttaaaaaaaaaaagtcaatttaggagagaattctttctgaaatcattgctgggtgcttttatggattcccaaaccctggggatcctgaaggctggaaactacagaatcagttcttgctgactgttgccaacatggacctgacacccacacttgagtttttaggatccccaatccccacacttgagttttagaggatcccccaagtcctgagaggagaactactcccctacatgcctccagaggaaagagtgaatagatgaagcatctcaaaggtcagtgactgccaactcagaggccagaggctccctgggtttgtggagactgtgggagtcctctctgaggaaacccaaatggcaacttgtgaaaaatacacctggaccccacccctggaaactctgagtcagtaggtctgggctgggcgggcatgtttcagtttcaccagttccctgggtgattgtggtgctcagccagggccagtgcactgtagagatcaagagcagggctttggagtcagaccttgggcaagacgcttcctctctctgagccttgatttcctcatctctaaaatgaggataatgagagtcccctgatccagggctgaggactgatggagatctgcaagtgagctcctgctcacaactcctctgtcactgccatttcctttgcagcatgacccctcccctagtcacaccctctctccacccccaacccctaccgcacccaggcacaggaagctgacagtctgaggtcggcccagctctctggagagaggccctgagtgtctgggcatttaattcttccttgtcctactatctgacagcacgcgggggtcagagtctctgccctgggttcttcaggatccaatggcaaaagtgcaggtgaggtgcaggtcttagggacagtacagggcgacagaactaagctcaaataactgtgctgttatgtggcaggttctgtcctgggtcggggagggcattcataggtcctctcctaagactccctttttagagagatgaaaactgaagcccagtaaggttaatatgctcactgggatttagtcaatctctgtctggcttttgtattttgtctgcttcttcccatgaagtgtttaagttcattcaagagatacttaatgagcatccattaggtgccaggccccgtgataccacagtgaaaaaaacgcaaatgtttctacccttgtggtgctgacattctagtcagaggaggcagataataaactaaatgaaatgtacaatatgatgaaagatgatacatgacatggaagaaaataaagcagaaatgggtagggatcatggaggtcaggcaggattgggttacaggtttaaataaggtgatcaggccgggcagggtagctcacacctgtaatctcagcactttgggaggctgaggcgggtggatcgcttcagcccaggaattcaagaccaacctgggcaacatagtgaaagcccgtccctacaaaagatagaaaaattaggcccagcacggtggctcttgcctgtaatcccagcactttgggaggccgaggcgggtggatcacctaagtcaggggttcgagaccagcctggccaacatgttgaaaccccatctctactaaaaatacaaaaattagctggatgttggtggcaggcacctgtaatcccagctactcaggaggctgaggcaggagaattgcttgaacccgggaggcagaggttacagggaactgagatcacaccattgcactccagcctgggcacaagagcaaaactacattgcaaaaaaaagaaaacacacacacacatatacacacaaaaattagccgggtgtgatggcgcacgcctacagttccagctactcaggaggctgatatgggaagatcacctgagccagggcggtcgaggctgcagtgagctgtgattgtgccactacacttcagcctgggcaacagagtgagacccagtctcaaaagataaggtgatcagaggatattccacctggtcagggaatatatattccctgagaaggtgtcatctaagtaaaaacagggaggaggaaagggtttgagccatgcagtgacctggagagaaatattccaggctgcaggaacagtaagtgcaaaggcccttgggcaagaatatgcttgacctgctggaggaacattaagaaggcagaatggctggaggcaagtaaacaagagggatgaggtcagagaaggtgcagcaggccaggtcacatggggcctggaggcctgtggaaggactcgaacttttactctgaaaattatgggaaaccattggagcatttgagttagactttaggagtcagtcagaaacattcagtgaatgggggacattatactatctttggagtcaaggttgagattagagtcattgctgccctcaaggaatgtagaacacccagaaatgctcacacaaacagtgaacagcaaaagaatattattatagagcaacttaatagggcaaattaataactgggttaatggcaccctttttcatccctattgttttaaattttatcctaaagacaatatattctcctggtttaaaaaaagaaaacacacagaagaatataatgttaatgaagaaattcggggctgcgctgtggtagctcatacttgtaatcccaacactttaggaggccgaggcaggaggatctcttgagcccaggagggctcttcctgcctcggcctcctaaagcattgggattacaggtatgagccaccatggcctgggcaatataatgggaactcatctctatgaaaaaaaagaattttttttttttttttccagacagggtctggatctgtcactcaggctggagttcagtggcacgatctcagctcactgcagccttgacttcctgggctcaagcaattctcccacctcagcctcctgagtagctgggactacaggagtgtgccgccacacccggctaattttggtattacaaaaaaattttttaacttagctgagcatggtgacacatgcctgtagtcccaattactcgggaggttgaagtgggaggatcgcttgagcctgggaggcggaagctgcagtgagcagaaatcgtgacactgcaccccagcttaggcaacagagtgagaccccgtctctaaataaataaacaaaaataaaaatgaatttattataaaattaaaacatgttagtggtaattttttttttgtgggggtgtgtgtgtgtatgtgtgtgtgtgacagagtctcactctgccacccaggctggagtgcagtggcactatccttcctggctcacctcaaccgccacctcccaggttcaagcaattctcctgcctcagcctccctgtaactgggattacagccgcctgccatcacacccagctaatttttgtatttttagtagagatgaggtttcgccatgctggccaggctggtgttgaactcctgacctcaagtgatccgcccacctgggcctcccaaagtgctgggattacaggtgtgaaccactgcgcctggccaaatttgtttttttgtttttgtttttgttttaatttttagatggagtttcactcttgttgcccaggctggggtgcaatggcacaatctcggctcactgcaacctctg

SEQ ID NO: 184 - DNA, 2663 bp, Homo sapiens
ggccggcgctggtggcggggcccggtgcatggcggtctgtcggcggagtcgccctcgggggctgtcagatttgtgacccagaaggaaatctctgacctcagctgtggctcttggtgctggccagaagccaacttcatgtctgagtgcacgagcagcagtttgccatggagagcttggggctgcacacggtgacccttagtgatgggacaacagcctacgtccagcaagctgtcaaaggagagaagcttcttgaagggcaggtgatccagctcgaggatgggaccaccgcatacattcaccaggtgacggtacagaaagaaggctatgaccccagcaccctggaagccgtccaactggaagatggctccactgcctacattcaccaccctgtggctgtgccatcggagagcaccatcctggccgtacagacagaggtgggcttggaggacctggcagcagaggatgatgagggcttcagtgcagacgcagtggtggccctggagcagtatgccagcaaggttcttcatgacagccagattccccgtaatggaaaagggcagcaagttggagacagagcattccgctgtggctacaagggctgtgggcgtctctacaccaccgctcatcacttaaaggtgcatgaacgagctcatacaggtgaccgtccatacagatgtgacttccccagctgtggaaaggcctttgccacaggctatggactgaagagccacgttcgtacccacactggtgagaaaccatacaagtgcccagaggagctgtgcagcaaggccttcaagacctcaggagacctgcagaagcatgtccgtacccacactggtgaacgcccgttccagtgcccttttgagggctgtggccgctccttcaccacatctaacatccgcaaggtacatgtgcgcacccacacaggcgagaggccctacacctgcccggagccccactgtggccgcggcttcaccagcgccaccaactataagaatcacgtgcgcatccacacagagtctcaggtctcagtccctctccctccctctggctctcccttcaccaaccctgtccctcacccctgtccccttagtttcccccttgccagccccagttcccacccccctcacagcccagtgtccccaggggagaagccatacgtttgcacggtgccaggctgcgggaaacgcttcaccgagtactcgagcttgtataagcaccacgtggtgcacacacactgcaagccctacacctgcagcacctgcggcaagacctaccggcagacctccaccttggccatgcacaagcgcagtgcccatggcgagctggaggccacggaggagagtgagcaggccctctatgagcagcagcaacttgaggccgcctctgcagccgaggagagtccgccacccaaacgaccccggatagcttacctttcggaggtgaaggaagagagagatgacatcccagcccaggtggcgatggtgactgaagaagatggggccccccaggtggctctgatcactcaggatggtgcccagcaggtcagcctgtccccggaagacctgcaggccctggggagtgccatcagtatggtcacccagcacggcagcaccaccctcaccatccccagtcctgatgccgacctggccacatctggcacacatacagtcaccatggtcagcgccgatggcacccagacgcagcccgtcacaatcattacctctggggctgtggtggctgaggactcaagtgtagcatctcttcgtcatcaacaggtggcactgttggccacagccaacggaacgcacattgcagtgcagctggaggaacagcagaccttagaggaggccatcaatgtggccactgcggccatgcagcaaggggctgtgaccctggagacaacagtgtcggagagtggctgctgagtccaagagggctgggtcccacaccatgctggaggaagtgccatctgcatggccactcttgcccccaagggcccaggctgtggctgacacatagaaggtggccacataggtctctggggtgagaagacagcaagaaaactgcctaactgaagggaatgggggccctgctcaagaagggggccaggcagctggaatcaggggagtgcatcatcctcgggagctgacaacagccaggctacaccagggcacccgcctctcaaaatcagctgggcgcccactctcctcctaaagaacacccttctggccctcagtctgttccccttctcaggtagagattggggctgctatggggactggccctgtagggttgagccacagacagctcttcagcccagtagcagtggagcaggccctgtcctgccctcccagcaataaccacctccctggaggccagctgagatgcctggctacttggcaccagggacttcctgacaccacagtcaattaattcctcaggggcctgtggctggagaaaaggtgcccagcccccaccactcctcagctgccccccaacctctctatggcagagaggcagggagtggccctgtacatagactgctggggattgggtttgatttgttttgtttttttaaattccattttgataatttttttcctgctctgggtggtggtggcacatggatgaatgagtatttaataaaagttccaaatttc

SEQ ID NO: 185 - protein, 577 aa, Homo sapiens
MESLGLHTVTLSDGTTAYVQQAVKGEKLLEGQVIQLEDGTTAYIHQVTVQKEGYDPSTLEAVQLEDGSTAYIHHPVAVPSESTILAVQTEVGLEDLAAEDDEGFSADAVVEQYASKVLHDSQIPRNGKGQQVGDRAFRCGYKGCGRLYTTAHHLKVHERAHTGDRPYRCDFPSCGKAFATGYGLKSHVRTHTGEKPYKCPEELCSKAFKTSGDLQKHVRTHTGERPFQCPFEGCGRSFTTSNIRKVHVRTHTGERPYTCPEPHCGRGFTSATNYKNHVRIHTESQVSVPLPPSGSPFTNPVPHPCPLSFPLDSSHPPHSPVSPGEKPYVCTVPGCGKRFTEYSSLYKHHVVHTHCKPYTCSTCGKYQTSTLAMHKRSAHGELEATEESEQALYEQQQLEAASAAEESPPPKRPRIAYLSEVKEERDDIPAQVAMVTEEDGAPQVITQDGAQQVSLSPEDLQALGSAISMVTQHGSTTLTIPSPDADLATSGTHTVTMVSADGTQTQPVTIITSGAVVAEDSSVASLRHQQVLATANGTHIAVQLEEQQTLEEAINVATAAMQQGAVTLETTVSESGC

SEQ ID NO: 186 - DNA, 2447 bp, Homo sapiens
ggccggcgctggtggcggggcccggtgcatggcggtctgtcggcggagtcgccctcgggggctgtcagatttgtgacccagaaggaaatctctgacctcagctgtggctcttggtgctggccagaagccaacttcatgtctgagtgcacgagcagcagtttgccatggagagcttggggctgcacacggtgacccttagtgatgggacaacagcctacgtccagcaagctgtcaaaggagagaagcttcttgaagggcaggtgatccagctcgaggatgggaccaccgcatacattcaccaggtgacggtacagaaagaagctctctcctttgaggatggtcagcctgtgcagctggaagatggcagcatggcttacatacaccgcacacccagagaaggctatgaccccagcaccctggaagccgtccaactggaagatggctccactgcctacattcaccaccctgtggctgtgccatcggagagcaccatcctggccgtacagacagaggtgggcttggaggacctggcagcagaggatgatgagggcttcagtgcagacgcagtggtggccctggagcagtatgccagcaaggttcttcatgacagccagattccccgtaatggaaaagggcagcaagttggagacagagcattccgctgtggctacaagggctgtgggcgtctctacaccaccgctcatcacttaaaggtgcatgaacgagctcatacaggtgaccgtccatacagatgtgacttccccagctgtggaaaggcctttgccacaggctatggactgaagagccacgttcgtacccacactggtgagaaaccatacaagtgcccagaggagctgtgcagcaaggccttcaagacctcaggagacctgcagaagcatgtccgtacccacactggtgaacgcccgttccagtgcccttttgagggctgtggccgctccttcaccacatctaacatccgcaaggtacatgtgcgcacccacacaggcgagaggccctacacctgcccggagccccactgtggccgcggcttcaccagcgccaccaactataagaatcacgtgcgcatccacacaggggagaagccatacgtttgcacggtgccaggctgcgggaaacgcttcaccgagtactcgagcttgtataagcaccacgtggtgcacacacactgcaagccctacacctgcagcacctgcggcaagacctaccggcagacctccaccttggccatgcacaagcgcagtgcccatggcgagctggaggccacggaggagagtgagcaggccctctatgagcagcagcaacttgaggccgcctctgcagccgaggagagtccgccacccaaacgaccccggatagcttacctttcggaggtgaaggaagagagagatgacatcccagcccaggtggcgatggtgactgaagaagatggggccccccaggtggctctgatcactcaggatggtgcccagcaggtcacaatcattacctctggggctgtggtggctgaggactcaagtgtagcatctcttcgtcatcaacaggtggcactgttggccacagccaacggaacgcacattgcagtgcagctggaggaacagcagaccttagaggaggccatcaatgtggccactgcggccatgcagcaaggggctgtgaccctggagacaacagtgtcggagagtggctgctgagtccaagagggctgggtcccacaccatgctggaggaagtgccatctgcatggccactcttgcccccaagggcccaggctgtggctgacacatagaaggtggccacataggtctctggggtgagaagacagcaagaaaactgcctaactgaagggaatgggggccctgctcaagaagggggccaggcagctggaatcaggggagtgcatcatcctcgggagctgacaacagccaggctacaccagggcacccgcctctcaaaatcagctgggcgcccactctcctcctaaagaacacccttctggccctcagtctgttccccttctcaggtagagattggggctgctatggggactggccctgtagggttgagccacagacagctcttcagcccagtagcagtggagcaggccctgtcctgccctcccagcaataaccacctccctggaggccagctgagatgcctggctacttggcaccagggacttcctgacaccacagtcaattaattcctcaggggcctgtggctggagaaaaggtgcccagcccccaccactcctcagctgccccccaacctctctatggcagagaggcagggagtggccctgtacatagactgctggggattgggtttgatttgttttgtttttttaaattccattttgataatttttttcctgctctgggtggtggtggcacatggatgaatgagtatttaataaaagttccaaatttc

SEQ ID NO: 187 - protein, 507 aa, Homo sapiens
MESLGLHTVTLSDGTTAYVQQAVKGEKLLEGQVIQLEDGTTAYIHQVTVQKEALSFEDGQPVQLEDGSMAYIHRTPREGYDPSTLEAVQLEDGSTAYIHHPVAVPSESTILAVQTEVGLEDLAAEDDEGFSADAVVEQYASKVLHDSQIPRNGKGQQVGDRAFRCGYKGCGRLYTTAHHLKVHERAHTGDRPYRCDFPSCGKAFATGYGLKSHVRTHTGEKPYKCPEELCSKAFKTSGDLQKHVRTHTGERPFQCPFEGCGRSFTTSNIRKVHVRTHTGERPYTCPEPHCGRGFTSATNYKNHVRIHTGEKPYVCTVPGCGKRFTEYSSLYKHHVVHTHCKPYTCSTCGKYQTSTLAMHKRSAHGELEATEESEQALYEQQQLEAASAAEESPPPKRPRIAYLSEVKEERDDIPAQVAMVTEEDGAPQVITQDGAQQVTIITSGAVVAEDSSVASLRHQQVLATANGTHIAVQLEEQQTLEEAINVATAAMQQGAVTLETTVSESGC

SEQ ID NO: 188 - DNA, 50833 bp, Mus musculus
  misc_feature (1)...(50833): n = A,T,C or G
aaatgcacaaaccttgtatatttattaaaaagcttcttgcactatgagagggggttggtctggtgctgcttgtatttacgtgctaagtcctagctcccaaggttgcccctgactgcccatgagcagatcctcatgtacaccaagtgatgctatgtaaaccttgccccccaatttaactggtcaatattaaaggctagagcctgtgattggacagtggagagagaaaggtgggacttgggaactgagtgaggggttcaggaggacaggaaggtgggggaggccaccatgagaggagatggatcatgagtacatgtccaggagaaagagcaagtgacaagggacatgtggctcggatatgagttagaatagctctaaacctgtcccatctcgggttacagcttatatataaaacacctgggttgtatgccttttatacaggctagctagaactatagctgggcagagttctcatctattctaactcgaacatattggtctaatgttcttcccagcaacttcccagctgtgtggcatctcctgctgccttagttagggttttactgctgtgcacaggcaccatgaccaaggcaactctaataaggacaacatttaattggggatggcttgcaggttgagaggttcagttcattatcatcaaggtgggagcatggcagcatccaggcaggcatggtgcaggcagagctgaaagttctacatcttcatctgaaggctgctaggagaagactggctttcaggcagctagaatgagggtcttaaagcccacacccacacagacacacttcttccaccaaggccacaaccactccaccaaggccccaccttcaaatagtgccattccctgggccaagcatattcaaaccaccacacctgccatcctgtctcactctggctgctcctctcatagcaactctcccatggtgacttctcttggccactcaccctctcttcacagggatcagacgtctaccttaactctctgcccagctataggctaaccaactctttactaaccaaacagaggtgatggagaacaatttttacccatctttgagacagtaggtgctggacaatgctcaagttctgaatgcaaccagatctgtgggcacagtaaccagcatttgaatacacagctcttgaaaccatcccccagtagatctcagggagtttgtaactgcacactatacaagataacagcaacaaccaggaacaagcacacaaaccaaacccaaagcaaaaactagttcaagttgttttaagaagaacaaagatctttgcattcctacagtgggaaagaaattttcttttctctagttccttaacacccacgccacacaaccgtcctttaacatctgcccacacagacagactagctaggacaatttcctagaaatgctatttctctgacagggttgctgtcacctacctctcatcccacattggtccataccgaatcagtttatgttcatacagttttctagatcttaattttcttcataggtgtgcgtagctgtgaatgcacaggtgcaggtgcctgcggaggccaggagagagcgtgggatcccggggaggggagctgggggtaccagtgatgagctgcagggcaggagagcagggagcagctctgccagctgagccatctccccaacaaacccatctcagatcattttccttgcaacctgagtgtgattttcacctcggacacccttcctgcgttgccagaattctttcagccaagtccttaaggaagggatatttattagaaaccatctaacaatgagtgagggtccatttttctgatcaagagctctttattaatccaggggtgcagcactgaaccatacttacctcctgcccgaggcctcctgccatggtgagctggtgaccatgaagcagtaacagggattgtgagctgcttcggcgtgcagggtaggaccgagtgtgggggtgcagggggctttttttctcatgtctcttttagttgttgtcgttgttgtttttttaaatatatttatttgtttaagtgcactgattggtgttttgtcttcatctgtgtctgtgagggccagatcccctgaacctggagctacagacaattaattgtaagtgggtgccctgaaccactgagccatttctgcagccacctctcttttaaatagtaaaacactctcctttataaataaattaagtttttcctgagtcttaaaacaagccttggtggggatggtgagatggctcagtgggtaaaggtacgtgataccaaggcttgagacctgaattaaagccttcacactcacaaggtaggcaactgaggcctggaagttgccctttgacctatacccatgggcactgttgagtacaataaataaataaataaataaataaataaataaataaataaattcatgaataaattcaaaacatgaagtaaaaattgtagattggaaagacttagaatgtgcattaagggagcttagggtctcagagaaaaaagtatgtgtttttcttgttgtgtctactctgatctcagccctagtgtgtatgttcctaagtgaacacgtgttcccatggtcaaggttaaggagcagaaaggggatcagggaaggctaaaggttcagtgttaaggaaggacaaatacagatgaaggagagaagtcagaaagactatacaccgctaactgcttttcataaaagagtttcagctcgtttatggatttttccctttttcttgtagtggaaaatatatttgacactgattgtgtaaaatccactgtgaagccccacagctctggggtagctattctagctttaagagtccaccatctcagtgaactttgggtctggttaatttggtgtgtgtgtgtgttcactatgaagttttgttttgttttattgggacagcctctctccgtgtggtgctggctggcctggaacttgctatgtacactaagatggtctggaacttacagagatctgcctcctgtgtgctaggattaaacgcatgggtagagctcgtgatagttttaatgaaaaagaagaaaaataatcaaacaaatatttagagtcaaaggcagagtccttgttttgttgtacttaatttcgcactgcttaatggacaggccagggactgatgacttcaaactctttaaaatagctgaagattaaggcgaattaaatgcagtgcctctgggatgtctgatccaaatttgtttttaatgacataattgtcacatattacatctgagattacatcccagtgaactggctatctgtgaggttatgctacagaaaacgaatttcccgtgtcaaaaggaaaacaagggcggcgctaatgttttaagggcgagggtgaagagggggagaaaattttgttgagcccagtctcataaagtgaccaggaatggctggtgacaagaggaggctgacatgtgctctcaatggatcttaaatcactgcaaggacaagctgcgacatcttctcagggtttttatttgcctaatttagagggtagaggtccttcccaatcatgcaaatcaggtcatgcccagaagcaaccgcgaagaataaaagataaggagacacaagtcctatgtaaatgtttatatttcattgtaaaagaacaagacgtgaaattcctatttgttcctcaatttttttaaagctaaaagtaattgcaatattttcttcctctagggccttcccttccacaattaatctttccacaccttccctcctgtgattattcccccaagctttaacaacagttgactaattcacagcatttctgcttcaaagctttcaaaacactgtggggtgggggtgctggcggaggcgattgcttggctccacaagccacgccctttccttcttaaaaattggttatttttgcagtatgttattaccatctatcaagaacacactcctgtaaggaaacccaacttccatgcttcactcaactggtaaattctcaactcttaggatgctgaacacctatacttcaatgtaaataaaaacacaaggtttgggccgtgagaaatgtttattctctactctttcaactgtagtacccaggtcctggataccagagccaatcgagcaattgaaagtctcaccagccgttcgtgtagaggaaacgctttcaaaatatatcattcatcttcatcttcgatagcagtttatccatatatcctttataagcatcattaagtattggtgcttaagatctctgtcacgaggtaagctttcaaatttataggtacatgcgctcgtggaggggcaaagggaccttttcttctatttattttttcttttattagaacaaaaggcagcttgagtacacttcaaagtctgggagttgctgtttgacaggcaggctgcctttgagaaagccgttcagtgcattaaattaaccgactcctggccaaatcaaattcaaggggaaaagtatttcccatgcctagagtgacaaacggaattacgaggcacgcttaagcagactgtcaaacttttatgtttacttaaaaaaaaaaaaactccacacagatggaaaagtctggtccgtggcagccttgtgtgccaggagaggctcacctgtacacacaccacaggcacgggtctttcccgggctgtccgcactgggggaggggatgggtggacatcgctagacctttgtcccgggggcctggggagggacgactttctggaggcttcgcagccacctgcactctgggaagccacacacagtgtggccctccggggtcgtcctggggcgagctttgtgggtgggtgggagcatgggcgttcccacctcgggggcggcgggtggccccacgctctggctgggatggggtgagccaccgctccgtggattcagagtgggaaccccgactagatcagctctgggacaggcccagggtgaagcggccccgccgcgtccgcaccgccaccgtgaggccgtgccggggacggtgccccgtggaggtggcgctgccgcttcgcgctcatctccccgcccgtctccccgccgccgctgccgccgcgccgggctgggctcgggcgggggcatccgctccggtctccccgcgctttcgcgctcccgcttcgcgtgcggcggctcgattccggggagggagtgagggaaggggtggaggtggcggggggaggccgaggggcgnnnnnnnnnnnnnnnnnnnnnnnnnnnnnnnnnnnnnnnnnnnnnnnnnnnnnnnnnnnnnnnnnnnnnnnnnnnnnnnnnnnnnnnnnnnnnnnnnnnnnnnnnnnnnnnnnnnnnnnnnnnnnnnnnnnnnnnnnnnnnnnnnnnnnnnnnnnnnnnnnnnnnnnnnnnnnnnnnnnnnnnnnnnnnnnnnnnnnnnnnnnnnnnnnnnnnnnnnnnnnnnnnnnnnnnnnnnnnnnnnnnnnnnnnnnnnnnnnnnnnnnnnnnnnnnnnnnnnnnnnnnnnnnnnnnnnnnnnnnnnnnnnnnnnnnnnnnnnnnnnnnnnnnnnnnnnnnnnnnnnnnnnnnnnnnnnnnnnnnnnnnnnnnnnnnnnnnnnnnnnnnnnnnnnnnnnnnnnnnnnnnnnnnnnnnnnnnnnnnnnnnnnnnnnnnnnnnnnnnnnnnnnnnnnnnnnnnnnnnnnnnnnnnnnnnnnnnnnnnnnnnnnnnnnnnnnnnnnnnnnnnnnnnnnnnnnnnnnnnnnnnnnnnnnnnnnnnnnnnnnnnnnnnnnnnnnnnnnnnnnnnnnnnnnnnnnnnnnnnnnnnnnnntgcttgcatctccgcgtcctcccccccccctccccacccctccgccgttcgctggcgctcgctttctctgtgagggtcggactctgcgtctatctgtggtgcgcctaccctctgggttgttttttttagggggagatatttctcttttttctccttcggggggtgtcgtgaagattccactggaagaggagtccctttaaagggacagagaccttgtctggagtcttacctggtctcatgagtcccttgtgtggcgtgcagggcgggttccgtccaattgttgaaactcctcattcgggggccagggtgaggtggtcgagttggggatcccgggtcgctaagaacgtctctgaagggggctgttgggggtactcggcagtgtgtgtatgggaagagttgtgtacgtgaggaaactcccgccaaaaaaaaaataccaaccctggtctagttgttagctccttgtaggcgaaactcttggtttcccctggcagtagcccagctgggtcccatgggtttgccccctgtgatcgcatcgcgggagccccgaatggggatggagacgacttctgagactacaggatggggttcttgtagattcttcaaaatcgatactgaagtgtgtgtttcctctccagaggctgcttgcctttggagaattggggaatggaatctgttggctgggactacttttgagaccttgaggttggtacgggatctcgtgccctcagggcttcgggttgaacagaagtgcggtaaaggtcctttagctccaaatggtggtgtatgcctgcctcaggttgctccacagccaggttaacttaagtcacaccttgggactgagaggcctttacactgtggttgtcaatggtgacttattgatcatccttaagaagtagatatttctgcccttgcttttattacatttttattttttttaaattttatgtgcctgggcatgttgcctgatatatgccgggttccccaagaattcagaagagggcttccaataccctggaactggagttactggagttgtgatccacagtgtgggtgctaggcatcctcttaaatgctgttatttttccagcatgcatatatatatataattattattattaaacaatatgtgtattggtgttttgcctaggaattgaacctgggtcctctggaagaacagccagtgctctcaactgtgctgagccatctctcctatgaacattttacatttttagagggtctcgctatgtgcgttgctagtctgaaatactatatagatctgcttggcctcaaattccacagagaaggcagtacttaagaatagcgcctctgcctccagagtactgggctggaaagtgtgctagtacaccccaccccacactgttttattgatgcactgtggaggcagagaaattcaaagctttgtccaggttacacaggagcaggattagaacctaggttggtgcagaacatcctctctctagagctctccgagactcttggtgtttgtagcctctcagcttgctaggagatctggattcacacatttttctgagcttctgttttctcgtggctgaaatggagatgatgtctgcacagtctcttgaggtagttgtgagaaagattaaaaagaaaaggccattgtagtttgttaaagtatgctgagtatagccatcctatcttaggtcttcctggtgaggatggccttggtaactgcctgcagctgctccttaggggcagagaatgctgggggaagcaccctgggtagattagatacaagtatcaagggagagagatttctgtggtaattgtaggtggagaattcgcctcagataaccccccaatcaacttgtccttgagttcaatgaagaccttagacagactacttaaaatttaaaagatttcttagaggcattcccagcttgcaaggtttgtggttggaaatgccccaagtagtattgcagttatcttaagtactgccttctgccggaagtacctagcatattatattatttatagtctgaagcatttcagatgtctttactttggacagggccaagagatagggcttctagccatgagatgtctctggagatgttttagatctgtgattttgtttatttatttatttatttatttatttagataacaggttctcactctgtatccctgcctggcctggaattcactcactgaagtaagcacacctacctgtttccacctcccaagtgctaggattaaaggcgtgcaccgttaaagccaacactacactggtgatgatctggtcctctgatggaactcattcattgtttatcaagcttgaaagtggatgatattcttaattgtcaccaatattgtctttgcctccccctttttttaaaaaaaacaaaaacaaaagaaaaacaaagaaaagaactatgatgttagccaggcacagcctacatcctgagttctaggacagccaggactatgtagagagactatgtctcaaagggtctcaaagaaacaaacaaacagcatggtcttgttttgttgctggctttgacctcaatcattctgacctagtatctgtcttctgaaaccttacgcattatctttcccataattaacctgtttgattcactgcatggctcattataatactagaccttatctcgtgtcatatcctaaagatctgtgtgcatttctgctctcttagtgagataagactccttgaggacagagatcttcagggatggggaactggcccagtgagtgaagggcttactgtgcaagcctgaaatactgagctggatccccagcacccacccgaaagtcaagtgcaaagtgtttctctaactcttcaagttttgggtgtagtatattggcctcagacccacaagaaacctaactattcttgtctttgtcaaaggcctggccatgtatccttaaacttatttatatcagtttttatctgtttttcccttgggagagagagagaagggtaaaaggagagagacaccatgggttaggaatcaagaaagcacagccgtgagggctggcaattagagttaagacctgcccagataaaatatagtaataactcggggttatagagggtagatatctggccagctatagtgctgattaaggcttactgtacgtaataaaagttgtgtgtcttttatccaaaaactaaatgatcaaaggtggggtaaaaaccccaaactgaactacattctccaactgttgggggacagagacacatagctctcagctgctcattgaccagtgtctaactgaaaccctgtggctcatgatcgaggaagacacctgacttcagtttctgacttccacacctgctggagtggacaggtgcacatgcagaaaccacgcatatatatacaccatgcacacagacacagaagtgtgtggtttaatcacttagcactctcgagtgctcgcttatctaccttttcagactcttcctagcgaatgagataggcaactccttcctccatgaagttcccattcagctagaagtagagaatactaaacctagtaagtaggtaaattatgtagcttagaagatggtgtcactaaaaagtaaataataggatgaaccgcctattgctggatgatgtaagggatttgtaattttttttttccccaagacagggattctctgtgtaggcctggttgttctgaactccattctatatatagaccaggctgggctcgaacctagagatccacctgtctctgcctcttgagagcttggatttaaaggtgtgcaccaccactgtgcagctgggatttacaattttaaagtaatcagatgattatcagtgatgtttgtaaagagaggtgccgtgtgaatgctttagagcaactgttctcaacctgtgggtcttgacccgttttatagggctcacctaagatcattagaaaacacaggtattttcattaccaatcataacaatagcaaaattacagttacaaagtagcaatgaaaataagtgcatggctggggatcaccacaacaggaggaactgcattaaagggtcgcagtgttaggaaggttgagaaccacggctttagagggatagtgcttacacaggaaacagatcttttggtgtccattcaaatggacaccatatatgaatgaacgcatatagcaatggatatccagctcacactcccgtggccttctctccttaggtttgccttcgtggtttccagttgccatgaggaagcctcgccgaaagtcacggcagaatgccgagggccggagatccccatccccatacagtcttaagtgctcacccacacgggagaccctgacttacgcccaagcccagaggattgttgaggtcgacatcgatggccgcctacatcggatcagcatttatgacccacttaagatcatcactgaagatgagctgactgctcaggatattaccgaatgcaatagcaacaaggaaaacagtgagcagccccaattccctgccaagtccaagaaaccctcatcaaagggcaagaggaaggagtcctgttccaagcatgcgtccggtacctccttccacctcccccagcccagctttcgtgtggtggatacggggagccagccagaagcgcccccattgcctgctgcttactaccgatacattgagaagcctccggaagacctggatgcggaggtagagtacgacatggacgaggaggacattgcctggctagacatggtcaacgagaagcgccgagcagacggccacagctcggtgtcggcagacaccttcgagctgctggtggaccggcttgagaaggaatcctacctggagagccgcagcagtggggcccagcagtccctaatcgacgaagacgccttctgttgcgtgtgcctggacgatgagtgccacaatagcaatgtcatcctgttctgcgacatctgcaacttagctgtgcaccaggagtgctacggcgttccctatatcccagagggccagtggctatgtcgctgctgcctgcagtctccctctcgtcccgtggattgcgtcctgtgccccaataaaggtggggccttcaaacagaccagtgatggccactgggcccacgtagtctgcgccatctggatccctgaggtctgcttcgctaataccgtgttcctggagcctattgagggcatcgacaacattccacccgcccgctggaagctaacctgctatatctgcaagcagaaagggctgggcgcggccattcagtgccataaagtgaactgctacaccgctttccacgtgacatgcgcgcagcgggctgggctcttcatgaagattgaacccatgagagaaaccagcctcaacggcaccacctttactgttcgcaagactgcgtattgtgaggcccactctccaagtgtggccgttgccaggagaaagggcgactccccaaggagcctcagtgaagtcggggatgaggatgggccgaaagagggtggaggggaggaggagcaggaagaagctgaggaggagggccaggaaggccaaggtggggtgggcagccccctcaagggcgtgtccaagaagggtaagatgagtttgaagcagaagatcaagaaggagccagaggaagctggccgagaggcaccctccatcactctccccatggtcactgtcccacagataccctcttacaggtgagcctcatgagacgctctcttgcaggactcttggtttgttcttcacagtagcccaggtcttccccacatacggctgatggatgcctggtctcctctgctcccaaatggagcctggccctgtgttgtggttttgtccctgccttcagagtaatgtgtctcctttagttctgagtgacataaatcatttaagttgcttgataacactgatgacacagtgtaactaaagtggtagttttcacagtggcactaaatggcattgtgaacaggataattctcgctgttaactctcccacggattgctaaatgattatcatctctggtctttgtatgaacatgctgtgtccttatactgcctctgtgacaaccccaagggctcacactggattccagtgggaagcctgcaagtgttaacactgttcacgagggatgtatgtgggtggggcagccctcctcttgagaagctttagatgttgggaaaagtggagttttagagccaagtctccagcccctccctcagagtcctcagagagagcactgcacctgggttaaaaattgtcagtttagccggcggtggtgacgcacgcctttaatcccagcacttgggaggcagaggcaggcagatttctgagtttgaggccagcctggtctacagagtgagttccaggacagccagggctatacagagaaaccctgtcttgaaaaaccaaaaaaaaaaaaaaaaaaaaagaaaaaagaaaaaaaaagtcagtttagtagctggggggtacggggatggggtggggggagcttagcagggaacattttccagcagagcccacctcaaggctgattcctttaaaaggtatacaatggtagctgtggtgctacacacctttaaccctagcatttgggaggcagagtcagataaatctccagaagtttaagtccagcctggtatacataatgagctctaggccagcgagggctgcacagtgagcccatgtccagaaacagcaaaggaaaggaagacaaatgtacagccttagaggaggagggaatcttggaggcttttcatctaatgtagtccttgcaccttctcccacattcccagatgaagaaaccacagccacgggaggtaaagttgctctctcctttgttcatgcgatgaagtatttattgagcacttactacatgccacatcctgttctaaggtggagaagggcagcttctgggctgaaagtgctaggctctcttgattggaaggttatgggtaaaagagcatctggcggcttggaggaaactggcactgtgaggagaaccggcagccagacctgccacgctgggaaggtacccgagcaagatcgggacgggggctcttatttcgagaacttcagcaactctgtcttcaagacagagctggtcttggttacctctttcttgaggtaactgggtcagtgcttagtccccatttgtacggtggccttgccctagggctagctcttggttgtctgtcatagctgtttgagctgcctttcccagaagccagattcgctggctaagaagaaacacaccacgtaatacttgtgtgacctttggtaagttatctaattgctctaagcctgagtttgtgagcaaactcaccagatagagttaagagaaatctgagtcaaagtcttagcacagtacctggcaggttgtaagtgctcaataaatggtggctactgctgctgctgctgtgttgttttatccccaccccacccgcacaaatgctgttgaccccaccatggccagtaggcagagggaggggctggcctgcaagtgggcaggtgtgcttggcatgggtgctggtgggaaaaggcctaggtaagcttggctttgggcgaggacatctgactagagatggaaggcagggagtggcagcgtccaccctgcttgccccatctttcttaggttttatctcgattagctacagttagctctcctcccatggagtgaggcaaagagataaagcagaggggcactggggccttgcttaccttgggcgtggactatggtagtgaagaggtcaaggcgttggatcccaagtggagccacttgtcttcttagctgtgtcaggagttggcaacccagcctgagttcctcatgtgcctgttattagtgggacagtgggggaggggacagtgctgttgtccctgagggctcattagatcctttcctgcccagccccagagctgttacatagctgtcataacccagagacccgcctgcctctgcctcccaggtgctgggatcaaaggcgtgcgtcaccacgcccggctcctataacccagatcttaagacctcacttgctggctactttttaagagcatctatcctgtatatttatctatatttagattgttgttttctccttttccctttgattgcctaaaatttaggcatttttagggtgctaagagtttttaaatgataaaaatcagaggtcaggtggctataatctcagttacttgggaggttgaggcaggagggtcctaagtacaaggccagcctgagtagtacagtgagaccccgtctctcacgaccctgcatccgcacacaaaacccctcagaggtcacattactctgagggattacgtttgggtacagaaagcagtaacctggcacattttctttgagcttggctgtgggctatcccagggtctggcgaggtcctcagccacaaaaggcagggtctggcaacacagcacacagcatactcaaaagcttgttttctctgtgctgttgtcagaaggaggctgtgggttccggagcacaggcctgtttctcagtaccttactgaaagttccttaacgacaggcagtagggctgagagagggttccctcagaagatcagttctccaaggcagccggagaagcaggggaaacatggccgctcggtctctcgtgccgagctgcctaactctgctgtcttctccctgccttcccccaagctgagacatttggtcacttccttctgttttcctctgtaaggttgagaaatgaactgagatctgaatgggatgtacagcgagcggcgtgtatcccgagcttcccactgacctgtctctcactcccctgtgcctctgcccaaggttgaacaagatctgtagtggtctctcctttcagaggaagacccagttcatgcagcggcttcacaactactggctgctgaagcggcaggctcggaacggtgtccccctcatcaggcgcctgcactcccacttacagtcccagagaaatgctgagcaggtaggtacgggtgactgttggcagcttgtgaagaaaactggggggacaggaggagatggtggacgtgagatggtgccaccactgccgcctccgcctccgcctccgcctccgcctcccaggaagcctttgccaatagcagatcaccctctgagtgatctgtccagaagagtttaccagcaccgcagagatcttcagacctggcaggggtctcttctgaagggagatgttttacatagttcctgcactatagataacaatagagaacgctaaactgtgtcattaaggaatgagaacaaagccatttcctcttgaattcatttggtcaaacttcagtttttcactttcctccttgcgtcttccatctctctggcttatctgtagtctttctgttgcctggtgtgtgtgtgtgtgtgtgtgtgtgtgttttgtctgttgtgcctgtgagttatacctgtgtctgatgtctgccctgcctgtacctaacagggctttcctctgtattaattgaacagcacagaaacaatgggatggggaccgaatgagagattctggttggttggttggttgttagagatttattttgtgtgtatgagtatttggcctgcatgagtgtttgtgtaccatgtcccgtgtctgttgctcacagagaccagaagagggtgttggctggcctgggactgaaattataaatggttgttaactacagtgtaggtgttgggaaccaaaccctgttccgctgcaacagtagcccgtgctcttaagtgctctgctgtgtctccagcccaagtgaaatgattccttacagaacaattagacagttttatcaggaagaagtcattatatcttgacctagaaacactcaatactgcagatagaccttaacaagctatatccacatgttgtttttaaaatttatggatatttaaggtcatttctttcttttttttttttttttttttttggtttctggagacagggtttctctgtatagctctggctgtcctggaactcactctgtagaccaggctggcctagaactcagaaatccgcccgcctctgcctcccgagtgctgggattaaaggccgccacgcctggcccttaaggtcatttctaacctgttgactgttttcagcaaatgattatcacagcacacacacaactgtgtcaaagacatggaacagaacataagatgaaagctatgcttaggttataaaagttgattgcataggaaatccaacagtgacactttgttctcttaaacctaaacaggctaagtatatagtaggacagcagattgaatacatagactcagtgatctcaaagcatattattcactgggctgtagagtttgccaaaagtttagtctctttgaggccaaaagatagctttgttaaaaaacgtattgttgccaggcggtggtggcgcacgcctttaatcccagcacttgggaggcagaggcaggcggatttctgagttcgagaccagcctggtctacagagtgagttccaggacagccagagctacacagagaaaccctgtctcagaaaaccaaaaaaaaaaaaaaaaaatccacacagcttgactgaaggatgaactccaggacagcctgagcagccagcccagtgtcatgtcatagaagaggtggctgggtgagagcagagtggcccaatttcgtaaaataagaatagatgccctttgcccttcagcttctcatagtaagtatgcaggcgacggcccagcccgtggtctgtagcctgtcccacgtggcagccaccacatgcttaggtagtgttttctgctcctgcttagttccttccccttgcccacagcactagttagttctttctcacctgctccatcccatctgccttcggatcctcccacgccgctgcagagaagcacaaagttcacctgacccatgcctcgagcctcccgtttgctcactctgcctgagcctgagtcacaggccaatctaatctatctggcctctcttcaacctctgcttcctgaagtctctacagcattagcaggctcctcccagcaagtcctcacattgccatcatggatctctgtgtccacaggtctctatgcacctttacagccttttttgatttcttcgaggtgtgtgagtgtgtgtgtttatgtgtgtttgtgtgagtgtttatgtgtgtgtgtttgtgtgcgcacacacagtggacatgcatcttgtgtgtatgatgacatgcccaccaggcgtcttccaggctctgttactgaattcagtgtttggctagattggctggccagcatgtcttctcctgcatatgcagctcttagcttaccctagcaagccttcccagccaaacctctccctatccagacgcctctctgttttgtattctctcagcagttaaaaataaaaaggtttagctggtggtggtggtagcacacagctttatcctatagcactggaggcagaggcaggaaggtctttgtgagttccaggccacctggtttccagagcaagttccaggacagccagagctgttacacggagaaactcagtctaaaaaaacaaacaaacaaacccccaaaaaggtttatttttttaaattcttttttttttaagatttatttattttatgtatgccagtacactgtagctatacagatggttctgagccttcatgtagttgttgggaattgaattttaggacctctgctcgctctggtcaaccccactggctagggtcggccctgctctctcagtccctgcctgctttggcccaaagatttatttattattatacataagtacactgtagctgacttcagacacaccagaagagggcgtcagatcccattacagatggttgtgagccaccatgtagttgctgggatttgaactcagaacccttttgaagcgcagtcagtgctctaacccactgagccagccccgtttattttgtttttaatttgtgtgtgtattataaatgtgtggggagtgtgtgtcctgagacctggtacctcagaggccagagggggttctctcagcattctctacttcttttatggcccaggttttggttcctttaagctgtcattttcctgtgttgcaaatccctcagcaacagtgcccacttctggaacaggattcactgatttttttttttttaaggtttattttatttatttgtttttttacttctcaagtgtgtgtgcctgtgtttaaacactaagcaggtagtggctgccactgtgtgcaggtgcctgtagagaccagaggcatattcctaggagctggagttagaggaagttgtaaatcagtcctgtgcaagagcggtacccaccctctagccccgcatttgctgattttcactgtttgaccaaactattttttttaaagatttctttatcttatatatgagtacactatcactgtccagacacaccagaagagggcatcagatcccattacaaatggttgtgagccaccatgtggttgctgggaactgaactcagaacctctggaagagcagtcagtgctctaacctgcagagccatctctccagccctgaccaaactattttaaacctccatctactagtaagaacttcactgttttctagccaaggcaaagctgtagggtgcgattccttcaaccccttagtcttactgagtttcttcagaaatgctttccagctgtgagggccatggccggccagcggtgcccctggggctggggaagctgtcagaagcctctcttcagtttgttcttgtagtacagtgctgaagactcactctagcaccaggaagcccgggcccggggccctgagcggtgctggggaagggccttcagcaacctcagggctggcgggaggctgaggcaaaaggaaggagaccacagcccccttgttcttgccttgcttagcgggagcaggacgagaagactagtgcagtgaaggaggagctcaaatactggcagaaacttcgccatgacctggagcgagcgcggctgctgatcgagctcatccgcaaaagggagaagctcaagcgggagcaggtaagcagagccctgccaggccctcgctggctcccctcactcctctggggccagcattctgtgtccctctggtgctgagcactgtgggctccacgctctgctcggttggtattgggtggagtgctcctggaggcatctgtgtttcgcggttcaactcatttgggctggagcctgtgcctagtcccacgtgcctgcgcccttgatggaatgtctgctttagaagtgtttggagggactctgacctgaatgttctgaaaggcttctggcgcacctctgtggcattgctaggttctcctggcctgtaaggagctggagtctcagtccaaggacattcaaagtcccccaccacagggcatggatacagcatagcatgtggttcaggagcatcatgtgtgctgttgctggaccgggtctaaagcctggcctgttactttctgtttccataacattaaacaaactttaatctctgtatacctcactgttttctcatctttaatagagataacgacagagctgacatcataaagatagatgaatttatatttgtcgaagttgagaatacttagtacctggcacatagtcagggctggagaggttgctgctgttgttactaatggtagtactggtcctctgccccactggggtgtctgtgagagttctctgcacatggcacagagcaaatattattaattgaacggatgacaagcccaaactgttctctctagtccaagaatagcagctgttactcgaatgctttcgaggggtgggttaaaattctccctcctcctgccgttcagttcaacagccacacgcccctctctgctaggccagcagcttgagctccactccctgtcctgggcagctctgaactgcgtctagcctgagtgggcagggaggacatcgcaagaccttcacaggtcaaactgtaattgtacccaggcttggtcttatagcttagattgtcttcctgcctcgggttcataaaaaagaggaggtttatgttgatgtggccaagagcaggagcttatctgccttactggtggctgtgtggtatttcctgtcatgcaccctgtaagatgacattggacagggtaccactgtagctctgctgagcctggactccccagtcaccctggcccacagggtgagctctcagtgcttatgagatacatgtgtgcttacatttggtcagtgcgcttggactaaggcctgggctcaatcacttctcagtttgttttccaaccaggtaaatctgttaactcactcgtgtcaccaaactccatgtaccagattctaaagtgggagcactaatctctgcttccgttgccatgtcattaactgagataatacagggagagcagcagtgtggcctaataatggtcaggagttctgtggaaactgactggagccccacgctaactgtcctgttagctctgtgatctggagccagtctcttggtctctctgtgactcctcttcctctgtgtgaaatgtctgtcaggacctggaccctcagtgttacaggagctgcttagacagccccacacacccgcccccaggcacacatctacacagaactaaacggaaatctttagccgggtgtggtggcgcacgcctgtaatcccagcactcgggaggcagaggcaggcagatttctgagttcgaggccagcctggtctacaaagtgagttccaggacagccagggctacacagagaaaccctgacttaaaaaactaaaaaaaaaaaaaaaaaaaaaaaaaaaaaaaaaaaaaaaacaagagatctttaaagggcttaggctgttcgttgcgacctagcatgagttattactggtgttagttactacagtcgataattgctatgacttcggtaagttgtggtctggttcgtgatgagtaggaaacatttgtaaggtggctattctgatttgttcactgccaccaggataggttatcacagacccggccatttccaaagggaagctgatttggctcccagcgctggaggctggaagtaaaggcatggtggcaggctggtgagagggatccttcctgcagtctgtcgcgacgggaaagcacccgagcaaggggtcgcacatgggagttggcctcaacagcagtcactcctgggagagcccacttgtaggcctcctgatccgtcctgggggcaaagccccaggatgccagcacctctccaccctcacacactgggagttgtgactgtgacacgggacctgcactgcttgtgtgagcttcaggtggggtggcgggtgtcaccccttgcagagatttgttacacctgattgacagcaggtctacactctgatcactcctactttcattgcaggtcaaagtacagcaggctgccatggagctggagctgatgccgtttacggtcctgttgaggacgactctggacctgctgcaggagaaagactctgcacacatctttgctgaacctgtcagcctgagtgaggcaagttgcccctctaggcacgaagtctgttctggaaatagcctgaggagagcaagcaagggttgcactgcgggccattcagaaatgagagtggggagctggtcggctggccggctggtagacttgctcagggtgtggggtctgtaggagggctgggtggaccaggccctgaggctcgtggtgagcccgacatggccacagcagagagttgggaagccaaaagtagcagtgaagggtgcgcccgtgaggctcataaatggttgttgtaattgtacaggttttatatgtttaggttccagattacctggaattcatatccaagccaatggatttttctactatgaggcggaagctggaatctcacctgtaccacaccttggaggagtttgaggaggactttaaccttatagttaccaactgcatgaagtataatgctaaagacacaattttccaccgagcagctgtccgcctccgggacctgggaggggccatcctgcggcacgcccggcggcaggcagagaacatcggctatgatcctgagaggggcacccacttgcccgaatcacccagattggaagacttttaccgattctcctgggaggatggtgaggagcctggatgggtagagaggagaaggaccaggaagagaggcacaaggacagggcccagacagcccaggatcagggtgggccttgggggtacaaaagctgtggctgggagcacactcagtgctgtgagacaggtgtttctgtgtatttggaaagccaaggcctctccaggcatcttctggatccctgcagtgtggctctggagcctcgggtgggaggaccaggaagtagagaacttcagagcaccgcactctgcctgtcccctcttgctgcataatcactcaggccagggattgataagtctctacgtggccgcaggcataactgggacttgcttcctgcacgtttcccaaattctgctctgtcccttctaggcagcagtgttgtagggccaaggcccatactgacactgctggaagtcactggcctagcccttccaggagcgtagtttacatccaaaagatgtcagcccttttcgctcaccctgtgctgggccggtccttcagcctctttgtcctccattctccctggcagtggacaacatccttatcccagagaaccgggcccatctgtccccagaggcacagctgaaggaactgctggagaaactggatctggtgagcaccatgcggtccagcggggcccgcacccgtcgtgtccgcatgctgcgcagggagatcaatgcccttcggcaaaagctagcacagccaccgccaccacagctcctgtcactgaacaagactgtgcccaacggggagctgccagcaggatctcggggggatacagctgtcctggagcaggctcagcaggaggagccagaagaggaaggggacagaggtgagagagtctcaggcaggcaggtgcggggtggtagggagtcaggaggaggaagaggctgaaatctctttagagtatcctccctgagggtaggcaaagccctcggaagtggtggtggtaggggtgtccctgtgttcccagggctgtggagaggttcagagaggttagggtgcccagcagctccccagtacacagttacacctgaagcatctttgccgctgatgcattgcgtcttccagctaagccagcctgctttctatcacgtgtgcagtgctctgagaacaggctacccttggctgtgggaggatgagcagagaagtgagcaccttgcttgtagccttgaatcccagcagaggagtcagattaccaaagaccgcattgagaagcaggtggctttctcaagtggaagttgtggcagccaacagccaagctctttcccactggtgcctgcccttgcatcagccccaggtttggggagacctgtcactcacagagcctaaacatgggttttggtagggctcaaattggagaaattggcccattttattgtaggtccaagacatggtagagaagccacatgacatcagaaggctatgtggccattaactttcacgtggcagtcagcatgtcatttgaattccactgcctgaccatggctaagcagggtcataatacagtgggccagttgccctcacatgacccagacggtttcctggtcaagtctcagaggttcttatagggatgtctgggctgtggcttgtaaaatttcaaatggagcagacttgtttgagagctgctgagttccttatgtctgcaaacactctttctgcccgctgggtgttcacaaaccagaactgaggacaggtgtgaaaaccccaaagtctgtgagaatttaatcctctagtctgacgagctgaagactcgccttattggctacaccagtggctttctcaagcatgagtgacatttgaaatacaaaccaccaggctcactttgtaagccctcttccctttgtgattccctttcatttggtctggttataacttaggcttagaattcttacaaaacttctagttcagtgcctagttcagtgtgtctcaacctgtgggtctctaccccgttagcaaatctctatctacaaagatatttacattatgattcaaaacagcagcaaagagccaggcatggtggcgcatgtctttaatcccagcacttgggaggcagaggcaggcagatttctgagtttgaggccagcctggtctacagagtgagtttccaggacatatacagagagaccctgtctttttttttttttttttagtttttnnnnnnnnnnnnnnnnnnnnnnnnnnnnnnnnnnnnnnnnnnnnnnnnnnnnnnnnnnnnnnnnnnnnnttggtataaatgacctcctggaatgacttgtagacagggtggcctcgaagaccctgtcttgaaaaacaaaaaaaaaaaacaaaaaaacaaaaaaacaaaaaaacccagcagcaaaattagagttatgaagtcacaactttgtgattgggggccgccacaagaactgtattaaagggtcgctgaccaagccagctcagtcagtcagcagggcctcggggaagggagcaaggatttaagagataattagacaacattatggtatgacctctgcaagtgctgaggctggtttatttttctcagtctgctttgataccattctagtaacatgcaaagaataggggcagtcctaggccaaagacaaagtagtcaaagaacaaaggaggcataaacaaagatcccctgattactgtattcagggacttaataagaccatcaggatccaaagaaatcattcctcagctgtactcatcctgagccttgcccagtgtcacattcctacctgagcctgcttccttgtcctagcctagtgtcctcattatttattatttcactttttattatttattatttattccttttttacttcctaaataagacggcatctgtctgaggctcttctgacaagaatgccttccttaacatcattgaaaatgcattatccaaagcagtgcgctcctgtcttagttggcaaggctctgtgcagactcttaaccatcattgtctgccagcccgccagctagtggcactgtctagggatccatttatagtttcaagccatgtattttgtctgccaacatgttgatgttgttaaaggcatgttgtaaatattcttgccaatatcttaagtggcaccaagggctctccataggtctcagcattgcgcaggctgagaaccactgtcctcgttgattcaaacgcgcagcagggattaagagctcttgggtctgaacagagctcacgcctcgcctccttttatctttgcttagatctgaggcctaagaggagtcaaagctgtggtccttgcttatcagagatggtatctgactggtaggagcagactgtttctagaatgttcaagcaggttctctttttctctaacagatgattcaaaattgcctgccccaccaaccctggagcctaccgggcctgcgccttccttgtcagaacaggaatcccctccagatcccccaaccctgaaacccatcagcgacagcaaaccttcaagccggttcctaaagtcccggaaggtggaagatgaggagctcttagaaaaatcagccctgcaactggggagcgagcccttgcaatgcttgcttagtgacaatggcattgacagactgtccctcacaaaccccgacagccatcctgacacccctctcggcaccgtgggccgccgaacctccgtcctcttcaagaaggccaagaatggagttaagctacagaggggtcccgatgggacccttgagaatggcgaggaccatggcccagaggacgatcctgcttctccagccagcacagaggatgaacactattcccggaagcggccaaggagccggagctgtagtgacagtgaaggggagaggtcccctcagcaggaggaagagacaggtgactcttcctgcgacttcttttcttatttcccatctgctttgctgctttgccttgacagggagcactctcccctgccagcaatcagggagcactctcccctgccagccatcagggagcactctcccctgccagccatcagggagcactctcccctgccagccatcagggagcactctcccctgccagccatctctagggtcctctgtgaggatacaagctgagagcagttgtctttagattgtgtcttaggctgtccctggccttaaggggaatgcaagactttatgatgtcaaatggtctctagctttccttccgttcactcttgagatattttagatactttctttcagacactgtcttaggcactggaggaaaattagtgaacaaaccatggaactctcttccaggggaaatagagactgcgggcaagtgaggcctctcatatttgaagctcggtgacatcaaaataaaaacactggtcataccatcagagaagagggcagagagtgctgggtggtatgagacagagcggccagggaaggggacatttgggtaaagatctgaagaaaccgaaggacgagctgcttgtgtatcttggggaagaatattctaaaaaggacagatgaacaaataccttggaggtgggcacacacaagcctgtcccatagcagaaaggagccagccgcagcaatgttgccggcggaagggcaggagaggaggtcacagagtagatcacagggctaggtcactggagtcctcactgcagggtctggtctctgatgggagagggtagtcagacccagtgccggctccacgagggtcccaatgcagtagaacacagagcatagggtgctcagagtgtgggctcagggagcttgacctgtgcttgggagggcttctcttgaaggtggctcctgaagctgggggcagctgggaaagggtagctggtgtgaggggccccgaggcacatggggggttacctgccaggcaggcctgtttggttgtggcaaggtaggaaggctgctcttgactgttgttctgtcacatgccctgtctgtggtagctgccattgtgtggccactgcttgctctctcctctctttctccccagcacagccttgccttcccctcagccatgcttctctgtgttaggccagccattcaggatggtaaagctgagttctcaccctgacttcctatcgcctgtcctggagggatgtaccctttctgagcttctttccttcttacagaggtggagctcgttacacttaggttgaagggctaaggttagaatcgattatagggaacgctgccaacggtagcagctactgtcatcttttcagttgtgtgtgtcttttcagacagctgaagatgattgtagcaaaaaatgaaggaagcccaccgacctggggcctggcactcggaatacagcttagttgtatacagcctgagctgcagctcaggaggcaggccttgatccttcacaggcacggcacagttgtgtccatgactcccactgaggtccttatgttagaggaagcatcaggccaggactgaggcatcctgctcaggcatctgctgtcacaagcatggcaggccttgctgctttctagccaatgtgtctgacagttcttaaatcggcggtctggtcctctgtcagccttggttcagcgatcagagctgtgggactcaacagatggagcagaggaagcctccctggcatggtgctcctgggacagtgacacggctcaccccacgtgaggctccttgcaaagggattcctacggaacagcctctctacttcacaaaaaggggccaggatttgagaggctacctagcctggagccagggctctggtgcccgtgctactctgctctgggctgctgtagtcctaagagtctgcgctcttcaacgcactggctctgtgaggtagctctgggtgtggctgaccctaggcccttatcctgtcttagcttctgctgccattgccagctgggttggagagggcttgagagtggttatcagaagaggtaagactgtgtgtggctcttcaagaggcagaggacctccctgataattgaggtttgaaattagagctgatccaggtactcgtgagcctgacctggggggagaagccatagtttccctccgtggtcaggcatgtgctgacttcatcttctttgtggggagagtgaggaggtacagtctgctcactagctaaccttgtctctgtgagagtccttctgccacctgtgatacactccttacagggacagccacctacccactttggtcctccaaggcggcttcccacggggaggcatgtgtcagggaagggaggttctgcactcagggctcactgtgtgtgtccttggcaggcgtgactaacggctttggaaaacacacggaaagcgggtctgactcggaatgtagtttgggtctcagtggaggactggcgtttgaagctggcaggtaaggatgcttatcccccaagctcgggcagccttaagacttcttttccttcgttctccattcagtgacaggtcgggcttccttctcagttctccctactgtccctgtctctgggagccccgagggaaagggattggcccttgatttctcagatctgtctagcagaagagcggtgttgatgagtttgtgtagctcaatctcttgccgcccattgaagttgccatttgagaggcatgctccgggacgtgcgcatgcacataacccagcttgttgcagatgtggtgtcataggattggtctcttcagtttgttttggcttctgttcagtgagggttgaaccctgggccacacacctgctaggcaagtgctctaccagtaagtttcaaccaaagctttttttataggatcttgttgtgtagacgtggatggactggaatccaaagcatctctactgccttggtctcccaggtgctgagactaatgggcgtataccagtatgcctggatttagcccttggtttttgaaaccaagatgtagaactgaatggctcaaggtagcctccagcttaacccttgtccccttgcgtcccaggtgctgggcttacaggcatgtgtcggctacacccagtgcccacaactgtggcctctgtggaggtattacgtaggggcgagggaagaccaagtacgagcttttaaaggtcccctggtttttagaggcccaaggtagcctgccatttctgagaagggatgggcttctgttctctagctgaagggaggatttctcccaagtttactgagcttactgccctgcattttctgttctcccagactctgggtggagggggttgcttgcgtgaaagggcctcggtgccactgcagaaggtgactgctgagagggtccctgtttagtagtacagaaaaggctggcctgtgtctgaaggcttctgcagcaggtctcactggtgtgtgtgctttgaaatttcctgctgagcttccaggtgggcgtgtaggccttcagttacacgctggcctgtgctggcttcccacatcagtccctcccccacgaacctcaaaactgcttggctctctccctgtctatcaaagcctccagagacacaaagcaagcagatgcggggagagagtttactagggctaggaaatacagatttcaaaatattagaaaatgcttcttgcttgctctcaggttggagttcctggcttccttcacagacagtggcccatgtctgtaacctcaacacttaggtgactgagataggagattcgtgaggtggagaccagcttgggctttgtagtaaagcctgttcaatacaaaacaaaactccaataaagctacacaaatatgtaagtgcctggaaggtcagtttactggagctggggtaagattgaggtcagccatctgtcaccttccagcccttgctgaggtggaagggtaccgtctgcccttactgaagggcaggctcccatctgagtcatggaaacaagccaagcagcctgctggctcaggtgatgcttgactttgtgaagaactccagacagctgctacttcttgctttccccaggacttctgcctggtagaggagccatgcccttgaaagatatttcctctgtggtctggtgttcagagtttaagtgtgagcgactaggacccagcaggctcagtccccagaaccacacggtgaaagtagaaagcccactgcacaagcggcctctcacatccacacacacaggtgtgtgccagcgttccacacccacacacacgtgatagtaaaccataaaaagtgagtaagatgggaggcccaagttctgactgcagtgttctccctccctcctggagcctctctcctctccattctccagcaagaacaggagggaagctcttatctgttagactgaagccatattgtctcttgttgttctgggttgttgttgttgttgttttgaggcagggtctcttcatagccctgacttcctggaactcactggatagaccaggctggctggccttgaactcacagagatccgcctgtctccttgcactgatcactcacctcttgcccatttgctccatggttggtctttccaaatagcttttctgagcacctttccaatcattgtgctccacaactgtctcttatacgccaggttgtgaactcatgtgactgaggcttggcccccttgacctcttgattcttgatactctggctcctccttctgagttctaggatggcatttgtgccccaccacacccagcttcgagttgtggtgtgagtcactgttgttaaatacctgcagtttccgtagcttgtcttgtagaggagatagatggacattattgtctgaagtgtagactgggctggcctgggtctttggggaagtctgcaaagcaaaccccagtggcatccatccgcctcatcagaaccacacagagcttgttctgctgctgcaacctagtctgtgataccttaaatctgaaaacacgaaaccatccatccacacagagtgcgtggttgtgtgatcgtggacttttcgaagcaccatgggtgggccactgctcagggacacagaaggtcacaagtggaggcaggctacctggcttgtctttcagctgcctctccctgctcttctctgccatgtacatggagagggacttaggggaaccactagcatcttctgtctacacagccaggctccgagctgcatgggcaggtgtcataggctctgctggtgttgcttgccaaataggtaccgactgctttcctgagtgaatgcgagttgtggttttggttaagccaagtttttgcataaattgaacctcagttccacactctagctattcccagcccttgctgcatcttggattttctgtaaaaatttgactcatcttttaaccacttcttctagttgagaaattacagatcagtgatattatttatttttgagaccatcttactttgtagctcagccactgctctagcctcaagaatcagagatccctctgcctctgccttcctgctactgctattaaaaagtgtgtgcccatgcccagcagcagtagtcagcaatcgtagttcttaaagtttgatgagtatgggcgttcctagccacatcatttgttgcccagaaacccgcagctctgaatgtgtgttaaaactgcatgaggaactattttaatgctagcgttcctgcggtctcagtccagctcttcctgcctttgtataatattcccttccctctctccctctttcccttcctctctctttctttctttcttcctttctttatttctttttctttttttcgaggcagggtttctctgtgtatccctggctgtcctggaacttgctctgtagaccaggctggcctcgaactcagagatctgactacttctgcttctcaaatgctgggattacaggcatatgccaccatgcccagcacttcccctttgcatttgcatgtgtgttcacctgtgtcaccatgcttgtggaggtcagaggacaacctgtaggagttagtcccctcctaccatgtgtgtctaaggatcagactcactgctgatatcaggtgccgttatccactgacccacctcatcctctggactttacctctttgcagtaggtttgtttacagaaagaagctcgtttcctttttagttggggggaaactctatgcctacccaagaaaaccttcactcacaaaccattgggaagtgagaagtagatctatttttcaatttagaaatgtctttgctaattctggaaagatgtgcctgttatagaacatttggaaaagaggcagattttcagatctcaaaaataaattggctcctcaagaaatgtgaagcacagagtgcagattcctgcagaggtgagagggcctcctggtggcagcctgtcctgagaggctgaggggactgggtgactgaccctccccgtgttgctgttgttcttgctgggctcatggtgtagatctgtgattagagggtatgcgacaccacgcccggccccatggccttctctctggatgaaaccatcctctgcggcctggcagcaatccctccacaaggatggactggtttctggtaggaactcgcaggtcacatgcgccatgggttaatatcatgtaggcctgcaaaggaaatggagatgcctttgtctctgcctttgtgctttcgtagctccgtgtctgttagacatggaaaagcaagagtgggttggttccaactaaaaactgctcacttcaccctctactctgtgtgcagtggcctgacgcctcccaaacgcagccgtgggaagccagccctgtctcgtgtgcccttcctggaaggtgtgaatggagactctgaccacagtggctcaggtgagactatcgaggcagagctggggaagacatgttccaaggagcaagccgtccaagctgctcgcatctttagcttgtgttgtattttgagtttatgttgctgtgatcgtgatcatggtaaaagcaaacctgaggggaaggggttctcttcacttagagcctgcagtccatccactgtgaagcagagccgtggaggaacgctgcttactggcttgctccccgtggcttgctcgggttctttcttatatggtcctggaccaccagcccggggatctcatcagccacaatgggctgcgtcctgccctcccttatcagtcttctgttaaaaagatgcccactgacttgccataggccagtgatggaagcatttactcaatcaatagtcccagaggacccgtgtctaggttgataaaaactaaatcaaagcaaaaacactagccagcacagtttgaatagttaacatgtgcccatggaggccgaaaatccagaagctctaatggaagccagcattccccactggaacattggctgctaactgtgtggttgttttttcagaattacttaatggatattcaacctgaaacctgtgtgtgtgtttgagagaagtatagagggcccccattcctttcttctaggtcatggtagaccctggaaatcctttgctttcaccagcctgcccagcggccctctgtgtgggaggacttttcattggtttcactgaagccctccacaggagagatttcaagtgtcttccttggtgctgtgatgagtatctgcttgcacaggtcgtcccacccatgcagtgttaggttgcaggaagcgtgtgtttgtagctctagctgttgttgcttcgctttgctctctagcgtctcagtggtaatgtgtcactgataacctggctctgtcgagaatgtctgtttcgcctgatagaaaagcaggcaaggcagggccgcaggaggcctggggtggctcccggatggaacaggtctagagcagctgcttcttacctcacggttgtctgtcacatcactcgggacggcccgtctctgccggtctctctaacacagggttccttccctggtccagctgtttgcttccttctgcctttctcatgtctgttgacagatgcatgcctttgagttctctttcttgtgagtgtctgcacacagacgacaggtctcacgtctagactctgtgcgtctgagcgtgaagtcaggaagtggatctgacacactttgtacttctggtggtgacatttttttccctttttaaatccacatactaaaaatgatgccaaacaatattaaaaaagacttgcactcccgaagcccaccatgggaacacagctgcccgttcctgggttgcttccgattcttttagtcacattttgacaagtgcagatgatacacacactctttttttgttgttgttgttgttttccaaacagggtttctctgtatagccctggctgtcctggaactcactttgtagaccaggctggcctcgaactcagaaatcggcctacctctgcttcctgagtgctgggattaaaggtgtgcgccaccacgcccaacttgatgcacacactcttgtgctcacagtttttgcttgtatatttcctcctttttggctcacagtttttctgtgcactgtattactggaaccttctatctgacaagcagtgctttgtggctgacgtgactggacaatgggtgacctccagcctttaacacaaacaatatgcacacttttgcctgaactcctatagtaaatttcttataataaatgtcctaagcagtttactggagcagatgatgcagacacgtattttaatgttcctgggacattggatagaatcacattccaagagaaccggaccagtctgtagtttctcctctgtgtggctcacgggttcctgctcagctggtctcggtgctggcttgtactggttcactgtcagctcactggctcgaaatggcacctttccttttcatcctagttaagaactatacatctctgctctcagatttgagcccttttccttagctgggtgaatggtcacttcctggtcacagtttcaggtgtccgggaaagaatgtggttttcgtggtgctcagagcatgagtgaggccaaggaggtgcagcctgtccgtcccaggccggatggatacccagggtcaggaaatacctgcccggctgcatggcactgctggtttgtggtgcagccaggtgcttggatggcccctcgtggcctggtcagagcagtgttcaggttctattgagatggccttctccgaattttccctcaaagcttccatgagagggactcccaacctggggtgcagacagtgctgtctcttcttaagctggggcatgtccccttctccttaagaggccctggaggtgaagccattatttttcccccggggaagctgtcccagaatccagagtcagaggttggtaaactatagcctgctgtctgtttttatgtggctcacaaactaaaaatgggcctacatctcaaattatgaaaaagatggtcttttataatgtgaaagttgtatgaaattcaaatttcagtgtcagaaacatgagttactgctgaggagacatgctcatctgcttagactctggttatacccatgctgcagccgcagagactgtgcggctcctgaaagggtgaaatatgtgctattcggccatttactttgctgacccctgacctggtcttagagtccctgaggaaagggtggagggagttgttgcctcaatcctgggctgccccagtcagatggaagctgcaggcaagggctttggggcaccatgccaagtcccctttgggcgctgtctcctcccctcccccaccccccaggcagaagcctcctgatgccctttgaagaccacggagacctggagcccctggagctggtgtgggccaagtgccgaggctacccctcctaccctgccttggtgagtctgccccagacgacaccctcctgttccctctccccctggcggctctggcccctgccttgccttgggggagtatctgattggatgaatgtggtgggagtcagctgcagagggagggccatctttaccctagcttttctggggcaccagcaacccacccctctccacacacaaaaggctctagttgttcagagacacccagtgcttagggcttctgtagcattgctcacttgcttctgagtaggaggaacactgttagtgaggttagcacgctgataatgcttagtggcactattaaacatctgccctactaagtccttgaaatgccagcgatagaattgttgatcttgttttgtcgggacgaggcagggtctgttagctactgccagtaagcactggggttggaatttgatttcagggctcataatatgatggaaagaaagcctttgttttgagccactgcattaggagtcttccccagtcctggcctctcaggactgcagtcggcccctttccccatgcatatgcctgcgcgtacgaggcagaacgcctttagccttttccctacccagcattccatgaacatgcccatcttacatgatgaaaacctgtcatcacgtccttgttactgatgacatcatcatgtccttgttactgatgacatcatctggcccttgttaatgatggcatcgtctttcagttgctctcatgtaccacgctttgaccatttcccagctccccgggtagctttcctctttctctgaggtcagcagctgtgagcgaacatcttagctttaccttggtgcacgatcgtgattatttctcaggcacgcccactaggggcaacatctgtgcaggattctggcacaagttgccaagttgcctggaagttagttctggtttacactcccactggtagtggctaataattctatctacctcctcggcttctgtctttgtcttagtcagggtttcattgctgtgaagagacaccatgaccacggcagctcttataaagtcaaacatttaattgggcctggcacacagttttagaggtttagtccgttatcatcatggcaggaagcatggcagcatccaggcagacctggtgctagagcagccaagaatcctacatcttgatctgaaggcagcggaagaagcctgtgattccacactgggcaaagcttgagcataagagacctcaaagtcccctttcatagtgacatacttcctccaaggccacctactccaataacaccataccctctaatagtgccactccctgtggccaagcattgaaatacacgactccccaggggcttttcctattcaaaccaccactgcctgctaaagctttcccgggtggggaggaactgaccacaggctctgcaagataataccaccaactggaaacctttggatcttgtgagactcatctggggagattttaaaagatgtgtaaagtcagctccaccctggaacaccaaagaagccttctagaggctgagtccaggcatcagggttttctctggttatttctcagggtctgtagcactaggggaggctatttaagacctctcctgcacagctctgggcttttcccagccctgcctctctgtgactcttgaacctgacagcagccttcaaagataaggaagacaggctcctgtttgtgatgacgaggaagccctgttgcagtgagattgtaccacttcttggagccacattggttcctatagcttactttgtcccctcctgggctatggcaggtgtggaaaaggcacacttacctggaagctggagacactgaactgggagctctgtacagatgagaccacgggccaggtgtggtggcgcatgcctttaatcccagcagcactcgggaggcagaggcaggcggatttctgagtttgaggccagcctggtctacaaagtgatttccaggacagccagggctacacagagaaaccctttctcgaaaaactgaaaaaaaaaaagaaaaaaatgagaccacagacccagtttattcattaaggaagtgatggtgctggctggtttggagcattgcatttggggttgggggttttgtgttttaattgttttcaaaactacaatgaaagagagacagtccaaaactaacctttaaaatacaaacatacaaaacactgagacctggtggtatacaccatttatctcagcataggcaggtggatctcactgagttcgaggccaatgaggtctatatagttccaggacagctagggctacatagtgagaccctgtctcagaccaaacaggacaaaagactgcagagaagaaattcagtcaccacttgaacacaacttgtgcgtttcttctgctgcatggcctgcatccctgttcccatgcatgtccactgtgcatgttgtaccgggaggtggtgcgagttttattttgcttctgcaaaagtaatgtgcacattacaggagatttggaaaaacagaaaggggggcggagcagaatgcccacgcctttgaagcacatggagtagtattcgtactgttccctttcgtgttcactgttgcagtcatggtgtctgtgtgcacgtttgctgcatgttgtgttgggccttaccacgagcttcatatccatgctctgtaaaccggcatcatgctcattgggtggacgggccatgtcctcagggccctcatcctccaggtcttcccagtctcttcctgatagccggcaagtgctggtggaggcagcagagcagtgccaccaccctcccaccccccacccccaccttcgggagctggggagacttagggctattgtatcttcagctttagccccaggaagagtggcaggcagcttgggagacagtttcaactactacatagctcatgggtgggccggaagtcgtctttcttagcaccttttaagaaatttgtttaagccgggtgtggtggcgcacgcctttaatcccagcactggggaggcagaggcaggcgaatttctgagttcgaggccagcctggtctacaaagtgagttccaggacagcagggatatacagagaaaccctgtctcgaaaaaccaaaaagaaaaaaaagaaatttgcttagatttatttatttaatatgtatgtatatgcgtattttgcttatatatacgtttgtttgtgtaccacacgcatgtctggggccagggtgggggtgtcagaaagtgtctgtcactttgaaatcgagttgcagaaggatgtgagccaccctgtgggtactaggagctgaacttgggttctttgctgagcctcctctcagtaccttagagtagccgctcagcacagcaactctcagtggcttactttggaaggacatggggtgctgccagggaaatgggcagtttctcatgagcagagagctctggggtgggacggacgtggaggttagattgctctgtctctagagaaggctcttcctcagtcactttccaagactctctggcctttgtacacagaggtcgttgagccagctgggctgggtcggaggctgcatgcaactcaggcgtaaagccagaggctccagagcagctggtctccgtcctctgccgcagtttccctgtctgctaacacctgtcaggtgctgccggcctcagcaggagattgaagcgagatggtgtgtagatagtcaaggacattgggaacagaaagtgctgcacagacctggagagctactgggctgttgatgacaagcctgctcagaatgagatggggcctggccttctggagattagttcctctggtggctttggtttttcccctcaaactccaatcctttcagctgtctttctgcctcctctccaattttaccagaggtatctggccccactcgccttgggaaggtggcaggtagccaaagcctgttgcacagaagtaaaggtgttgcctctgctgcctggctgagctttctctgtggtccagcctaggtgcccagttgagcaaggccctgagtcctgtagtggattacagaggtggtgaaagcatgcccagggaagcagccctagtcctttctagcagacattgtaagagagctggcttctctggcttccacgtccggaccgcctgctcagcctgaccaccaggtccttccgtctgaaggattgattgcacaaggctgggaggggtagcacagtggagtgggggaacaaagttaagatttcaattttagggtgggtgctggtgattgatccatgccagcctctccaccactgatcatgtggagaacggaacccttgtgtgctgaggccaatgtcttggtggtgggctctcccaccttcccctgcttagggcatgtctcctcttctgcctccagatcatcgatcccaagatgccccgggagggcctcctgcacaacggtgtccccatccctgtccctccactggacgtgctgaagctgggcgagcagaagcaggcagaggctggagagaggctctttcttgtcctcttctttgacaacaagaggacctggtgagtgacagctgctgtaggagcctggccaaggtgcagggtcagcccacgggaggtgggagggcttctgcttgtggctgcccctaaagacactagaggaaggtggagtgggcctccttagggggcttttcaggagactttgctcagaaagctacaggatgagggctacagcctgggcccagggagaagtcaagcacagcacactttgagtgtgggcctcagtgttcctctgtagagctcaggaggccttaggaattgtggatctctgtacccttaagccgtcagtcactaaatgtcacctgatcctggggatggacatgaccttgggtgggcagctccgtagctagttactggagggagatccagaggcagaggggagtctggacagtgtggtgtcctttatgaaggcttggaggcctgtgcctagtaaagtgttgtcccgaatctctgtagaaaggaggtagagtggctggtaatggagctgtccgactttgcactcctctactccccttgagcttgcctgacctggagctgggtccagaggcccccgtagggccttctgcagctgcacctcagctctgcttgcattctaggcagtggcttccaagggacaaagtcctgcccctgggtgtggaggacactgtggacaagctcaagatgctagaaggccgcaagaccagcatccggaagtcagtacaagtggcctatgaccgcgccatgatccacctgagccgagtgcgtggctcccatgcctttgtcacttccagctacctgtgagagccgagctgggcctgtgtctgccttctttgcctctcctctgtccctgaggcatgagaacctctgctgcccctgccacgtgtatggccggcagcttctttctaatggcaggccctgactggactgggtctccgagggcaagacccaatattgaccaatcatgtggttcccctggagggctgctgtgtgccaaaaaactcccacccgaggtccctggggatattccactgaagaaccacttagaagtagaaacagctgagagtcttagccagccagggagatagacctggcccacaaggcaagagggcctaggctgcttttctggggccagccggctctctccatgtctctcccacctaaccatacctcagggcaggcaaggttctgacattgatcccagagatgtgccagggtccctcgggaaccctcagagcttcccttcccccacaccgcccgtgcttgcacccccctgtctcatctcccacacccaacccaggttctcccttccctcattgctctctgctctcccttgtgccaaactgacagcaacatcaccaaattgatctttttctttgatgtcccatttccttcctggccagctgctacattagatggatgtctgccaggcgcttgagtcccaggtagaagctaccccacctgtaaggaccctcccccactcacagccctccagcaggcatgctgctgccctcccctcctgcagcagccataagcctcactgcatcagcatgatcaccgcggcacgggcggcgggtggcgggtggcgggtggcgggtggcgtgcggcatggcactgccctccagcacccgccctctgggattgctgcccctgcctcccagaacagggctcttttctttcatctcctgccttcaacctcttctccaccatcacctcctcaatccctaccctcaaaaaggaaggaaaaccaaactgtgaatgaggaaagctgactgacaagccaacgcagctctcagaggcttctgctcttgacatttcttttcacttctttaagcaccaaagccgcaggcgggtttgcagaccgccaattgccatgttgacttctaccttgatgttatttttaattgttttcaattttttcataggggagttttgggcaaaaaacgaagtccctggggagatcactgccatttttacatactcaaactttttaaagaaatacaaccaaccaaccaccaacttcttacacttttgggactcgagccagagtttaaaagggaaccaacaaaactcaccaagagggccaggttctgtccagcaaacagcacagccacgcgggacagggcgtggtgtacataactgtaagatagcaggcacacactctccattaccggaaccctcccttgtgcatccatgctgcacagcctaatcaaggagccgacacgtccccctatccccaggtagctggtcagctgtggactctgtgacccttgtctaaacctgtgtcaagatcttggggcttctccctttctgtctccttcccccaacactatctcctctgtctctatttttcagtctcggaatccttccctctctccgagtcccactttaaaaactgctcttttaggacaggatgcggctcggatctgctgtggcacagggcctcttctctgtctggtctgctgtgaagcacatgatgctctatttattgtagaaagtgactttatttgccttctagaattgtttataacagatggttataagagaggtaataaacagaaaaacctatgcctgtaaagaatacaagagttaattttacctaccataatatgatgtcttattttctctccgagaaataaatgttctatgggctgtggtgtgcggtgctgtttgctgtccgtgacggggcctcctgtcctaacaccacccgcttctctgaaggcagaaccattaagaacggacctgtctgtcctttagatctcatggatggcctgaggagggtcctgccaggttgccgcaggttgcagagaagtcattgttcaagtcactgtgtgctgtatgaggccgctagaggctgatggtgggtgctctccttacagaagcagagctcactgatggagctcctgtctggccagccagccatcttctcttcccgtgctgaggttacagctgcctgtcaccaggcaggtttattttttgttgttttgtttttagaccatccctttagaagatctgaactcaactcttgtcatgtttacatgacaagtattttgccagctgaacccagaaaggggtaccttatttgttcattcattcattcattcattttaatttattttacatttcaaatcccagtcaccccctcccggaaacccccattccatcctccctccccctgcttctatgagggtgttcctccacccacccacccactcccaccttcccacccttgattcccctacactggagcatctgtccagccttcattggatcaaagacctcttctcccaatgatgcctgacaaggccatcctctgctatatatgcacctggagccatgtgtactcagttggtggcttagtccctgggagctctggggggtctggttggttgatactgttgttcttcctgtggtgttacaaaccctttcagaaaggggcatcttgaagcatagactcaagaggcattctcaggaatagcatgtctgtgcaaagagcctgtgggagtttgctactgtcctccctactcaggccctctgatatggtagaaggcacagctcttggttaccttcacagggcctaattcatataacataataaagtgcgtccagcatgcagacaacccttgtgctgcataaacagtgcagacaccttggcatgtaagacattgctgacgcctgaggccattgtgaggggcctggcctggagaaaggtttggaaagaagatatgtttggccgggcaacagctaaaggtttcaaaagaaggaagcagttaatttaagccttgaaaacaggtttagaaatccataattatgagctgggcagttcttgcgcacgctcgactggccaggaagaacgacgctgcaacaggatccttctgcacatgtttattgggagagcttgattgtagaggcggaaaaacctggagcccagaactggtgctgcttttataggcctaggaggggcgtgtctcacactcggattggttatgcactaagcctcatttgcatgttcctcatctgattggctactctcagtaccttacagaacctcattatcatacctcatttgcatgtctcacatctgattggttatactctcagtaccttacagaacctcattatcatgcctgggccaggcagtgtctttgcaaaaaactttactgcacatgtacacattggttgtttgtccaatcttatgcgtggtggccagcagtagtcagtgccactcagcaacggcacatgtggcttcccacaggcagtggtggtgcacacctttaatcccagcagaagcaggtagattgcagatttcaagaccagcctggtctacagagtgagttccaggacagggagggctacacagtgaaaccctgtcttgaaaaaaaaccaaaaacacaagcagtctttatttatgggttgtattttgaggtacagaggtgactgtaaaatgcggaaggcatgttcattacttcgtctcctccccctggctgacctcaaattcaccacacagaccaggctggctttgaactcagggactgttgtgtctttgtctcctgagtgctgagattaaaggtgtgtgccatcccatccagattttttttttcccttacactagtgaatccagtttgtgttggccacctccccctgggcatggggcccgccctggagtggggtcatacaggatatgccactccactgaggaaaactgacatcccctcccccagtggcaacaaatgccagtagaccctcagctaggctgggacttcacactctcttcccctccttcatgctgagatttttgcctggctggagtttgtgtgggtcttgtgcatgcttccacggtccctgagctcacgtgtgtaccccctttactgcacaagtctgaaaaatggtgcttctttgaagttatctaccgcctctgcttttcccactccctcttctgcgtagatcctgagccccaaggaggatgctgatatccacatcccatccaaagctaccattctaatgtcctgagttctctgaatattagccagcgcgtgtctacatgttaatagccttcaactgcaaaaagaaggttctgtggcgagagtcaagcaacagtgccccaccccccacccccggcccacaatctatctctccatggcttcctggactcactgaactattagtaattaagtcccaggaatggattccctcttgtggagccagtttcaacccaatttttaaatgcaattggttcctctcctaacaaccatcctggtcattcttgtcccagtgggcatatcttgccagcaggttgttgtcgctcacagggttgtcagcagggtgacattggtgaccactttcttctgggggtatgcacagcaccttactgctggcctgtgggtcaagtactagagggtaacggagagcactggcaataccctttaatgtttttgtttttgtgttttttttttctggggagggtatatggggcaccactggctaacaatctacaaagaggtaacccatttctggtttggggtttcatttggtagcacagggcaacatagtattctcttttcccttccttgaaagatggcatccttcctcatgaccaccaccttgctacctcacttctgtggatatttattctttcctttttaagtttttcatgacatggtgtagtgtgtgtgtgtgtgtgtgtgtctagtcctggctgtcatggaactttctccatagaccaggctgacttcaaactcagagatccacctgcctctgccccctgagtatgggagtgcaccacacgcaccttccatggactttctgaatgaagcacaccaattttaaatttttaaattcaattaaaagcaattaaaagaatctaaaagcaatgtccagggcctggagcaatgaatggtccagggggttaagagcacttgaaactcttgggttcagttcccagcacccacagagcagctcattgtcataaccgctaattctgttccaggggatctgagtacacacacagattaatccagcccaaagatttatttattattatatgtacatatactgtagctgtctttagacacaccagaagatctcattacagatggttgtgagccaccatgtggttgctggggtttgaactcaggacctttggaagaacagtcagtgctcttaactgctgagccatctctccagcccctaaaacaactttcatatatgagagaaaatgtgcattgtggatctagtttgccctcttctggcctccaagggcactacactcacatgcatatacccaccttcatatacataatcacacataataaacatatctttttaaaatgcatgtaggagccgggcagtggtctacactctgtagaccaggctggcctcaaactcagaaatccacctgcctctgcctcccgagtgctgggattaaaggcatgcgccaccacgcccggcacatgatcactactttagaaaatgccccacagctggatctcatggaggcacttccccaactgaagctcctttctctgtgataactccagcctgggtcaagttgacacacaaaaccaggcagtacaaatgacttcccttctagcctactgcccaccagaggtagtgggaaaaaaaggctatgaggatacaggggaagtggacctgtttagaaatggttccttggagcaaatccagtgtgcattgtcaggatatcagcagttcagctcacacgaatcagcaatggcagctcgattctgaagaagccatgggggtcagctgtttgctgtttagaagtagttccttggagcgatttcaatctccagttgtcaggatatcagcagtccagttcagtagtgtcaggatagcaaacaggaatcagcagtggtagtactacccagcagaaacaaccaggcccagccgggcatggtggtgcatgcctttaatcccagcactcgggaggcagaggcaggtggatttctgaattcaaggccagcctggtctacaaagtgagttccaggacagccaaggatacacagagaaaccctgtctcgaaagacaaaaaaaaaaaaaaaaagaaagaaacaaccaggcctccaccaccggcataagtcagcaggagcaacagaaccagtagggacaccaggagaagttctctgcagtgcatctcaacaaagtgaatgaagatcagcgaagacaagacacacgagatcaaagctagctatgaaagccccgccgtcactgctcatctggcccctattatactcctcttcccacaggtcttgactcagacgtgagtctgtatcagctgacatatccagaaacttccactttgcttggccaattggctgagtggcagaacaccatcagaagtttttgttgtttctttctgtgaattcatgacaaatgacgaccagtaagaaatggccaggtaccaataccatccagcattttctatcatctgttgggttatatttatattccttcttaacatcacgcatcctttcacgtgtttgctttaacaaaacatcttttcctctgtgtctgcttcaggaaaacattctttcacgtgtctcctttagcaagacatcctttcacctgtgtgcctcagcaaaacatttgacatcactgactttccaaagaaaccagaactttctacttcacctcagcctcctggctcttcctggcttgtattggtagatggtactaagccagactgcctattgctattgtgttaaaatattagtagtctctacagtactaatatatccacctccagcaactaggctgtggggtacctttttcacggacaccggctgtattctttactttcctgttgctgtgagaaaatgctctgacagaagtaacttgaaggagaaatgttttattttgtctcacagtcctggagggacaaagtccatcctgataagagggcatggcagcaggaacaggaagctgaacttaccatatccacagtcaggaggccgagagcagagaccaggaaacaatgctggtctataaagctttcctccagcgagactccacctcctaaagatcctgttgcatcaactgactatatgaccactctatggtacaattattgggaaggttttattgtaaatacaagagaatggccagaggcgcctggaagggtctattgcagagacagcagtaggctgagcatggcaagtgtactggacctggccatgagaaacagcagcaaagcagagagaggaacagagagagagtgcacagcgggcagggagtataattgagtagggtaataaagagaactggcagctgtagggagggaagccagtgagctggaggataggaggggccaggactccggaaagtgtagcaggtccttgtaatgccgagggagtatggaggtcagtgtgtgctttgggatgctaacagacaccacagatagcctttgtcccttctgccttttagaatttgaggaccaaaggtttcctagcatgtctcatgagtcagtgggggacaattcaccttctgactaaaacatgggccatagaccagattcttttccatgtgcaaatatctagaaatgagtagtcaacaaatggccatataactcttttgctagtttggaaagttcctgtctctgctttggggcagaactgccagcatcagagagagaggtcacccctaggtagacacatcacctctgaggataagtttggaaggaaggtggttagagaagcgaacttatcgctaagctttgaataggatttttttttttagatttatttactttatatgtaagtgtactggctaattttgtgtcaacttgacaccgctggagttatcacagagaaaggaacatcagttgaggaaatgcctccatgagatccaactgtaaggcatgttctcaattagtgatcaagggggaaaggccccttgtgggtgggaccatctctgggctggtagtcttggttctataagagagcaggctgagcaagccagaggaagcaagccagtaaagaacatccctccatggcctctgcatcagctcctgcttcctgacctgcttgagttcctgtcctgacttccttggtgataaacagcaatgtggaagtgtaagccaaccctttcctccccatcttgcttcttggccatgatgtttgtgtaggaatagaaaccctgactaagacagtaagatcttactatggatggttgtgatttgaactcaggacctttggaagagcagtcggggcttttaaccactgagcaatctctccagccccctccaggattgttttagacacagctttacaaacagtagctcagatatagctgcacctagtctccatgaattttattagtggctccagccacgaacaccccacccaggccactctgtggccttcccttcctgtccctctctgcttcacagggagtgcactttggtgaacttctcctgcaaggaatcatgtgccatgcgctcttccatgtctagcttctctttcagctgtttttgattctgtcctgtggctcatatagccctttgctttgtcagggctgaatggagtttcattatataaacactgtacgtttgtccattctgccgagggtgtgtgtgtgtgagtgtgcgtgagcatggatgtgtgagtgtgtgtgagtgtgtgagcatgtgtgtgtatgtgtgtgagcatgtgtgagtgtgtgtgagtgagagtgcgtgtgtgagcatgtgtgtgagcatgtgtgagtgtgtgtgtgtgtgtgtgtgttgcacttagagtttgggcattggaaatagctactaggaatgcttttgcttttatatctctctctcttatatgtttatttttatttttatttctaagcatagtctcattgtacggccagtggctgcctgagatctgctgtctctgcctcagagtcacggtctgacagtcatagactagagtgtgtactgccacagctgtcattacacatgtcatttgcctgccactaatacctatttccctttggtgtggttacaggagtgacctgctccatcatggggcagatgcagtttagtagattctgccatcgctgatgtgtgtgtatgtgtttttgtgaaagagagtgtgtatggtgtatgtgtgtgagtggtgtgtagtgtgtgtgtatgtgtgtgagagcgtgcatgtgtggtgtctgggtatgtgtggtgtgtgtatgtgagagagtgtgcctgtatggtatgtgtatgtgtgtgagtgagagagtgtgtgtatgtaagaaagtgtgtctatgtggaatatgtgtgtgtatggtatatgagattgtgtgcagggtgtgtgtgtatgtgtgtgagagtgcatgtgtggtgtgtgagagagtgtgtgtgtgtgggatggtatataagagtgtattgtgtggggtgtgtgtatgtatatgggtatatgtgtatgtatgcgagagggtatgtgtgtggtgtgatgtgtgtgaaagagagtgcatgtgtggtatcagtgtgtgaggtgtgtgcgcatgtgtggtatgtgtggtatgtgtatgtgtgtgtgtttggtgtgtgtatgtgtgagagacagtgtatgtggtatgggtgtgggttcatgtgtggtgtgtgcaaatgtgtgtgtgtatatatgtgtgtgagagagtgtaaggtgtgtgagtgagtgcgtgggggtgtttttgcaggcatgtgagtgcactacaggattgaggaggtcagaggccttgtgaagtcagttcattccttctacccttccctgggttccagggacgcttccatagcaagtacttttacccacagaatcatcaccagaccacactttatgcttttacgtcccaaggccagtaactctgggtcagagcaggtctctttggctgt

SEQ ID NO: 189 - DNA, 3500 bp, Mus musculus
atgaggaagcctcgccgaaagtcacggcagaatgccgagggccggagatccccatccccatacagtcttaagtgctcacccacacgggagaccctgacttacgcccaagcccagaggattgttgaggtcgacatcgatggccgcctacatcggatcagcatttatgacccacttaagatcatcactgaagatgagctgactgctcaggatattaccgaatgcaatagcaacaaggaaaacagtgagcagccccaattccctgccaagtccaagaaaccctcatcaaagggcaagaggaaggagtcctgttccaagcatgcgtccggtacctccttccacctcccccagcccagctttcgtgtggtggatacggggagccagccagaagcgcccccattgcctgctgcttactaccgatacattgagaagcctccggaagacctggatgcggaggtagagtacgacatggacgaggaggacattgcctggctagacatggtcaacgagaagcgccgagcagacggccacagctcggtgtcggcagacaccttcgagctgctggtggaccggcttgagaaggaatcctacctggagagccgcagcagtggggcccagcagtccctaatcgacgaagacgccttctgttgcgtgtgcctggacgatgagtgccacaatagcaatgtcatcctgttctgcgacatctgcaacttagctgtgcaccaggagtgctacggcgttccctatatcccagagggccagtggctatgtcgctgctgcctgcagtctccctctcgtcccgtggattgcgtcctgtgccccaataaaggtggggccttcaaacagaccagtgatggccactgggcccacgtagtctgcgccatctggatccctgaggtctgcttcgctaataccgtgttcctggagcctattgagggcatcgacaacattccacccgcccgctggaagctaacctgctatatctgcaagcagaaagggctgggcgcggccattcagtgccataaagtgaactgctacaccgctttccacgtgacatgcgcgcagcgggctgggctcttcatgaagattgaacccatgagagaaaccagcctcaacggcaccacctttactgttcgcaagactgcgtattgtggggtgggcagccccctcaagggcgtgtccaagaagggtaagatgagtttgaagcagaagatcaagaaggagccagaggaagctggccgagaggcaccctccatcactctccccatggtcactgtcccacagataccctcttacaggttgaacaagatctgtagtggtctctcctttcagaggaagacccagttcatgcagcggcttcacaactactggctgctgaagcggcaggctcggaacggtgtccccctcatcaggcgcctgcactcccacttacagtcccagagaaatgctgagcagcgggagcaggacgagaagactagtgcagtgaaggaggagctcaaatactggcagaaacttcgccatgacctggagcgagcgcggctgctgatcgagctcatccgcaaaagggagaagctcaagcgggagcaggtcaaagtacagcaggctgccatggagctggagctgatgccgtttacggtcctgttgaggacgactctggacctgctgcaggagaaagactctgcacacatctttgctgaacctgttccagattacctggaattcatatccaagccaatggatttttctactatgaggcggaagctggaatctcacctgtaccacaccttggaggagtttgaggaggactttaaccttatagttaccaactgcatgaagtataatgctaaagacacaattttccaccgagcagctgtccgcctccgggacctgggaggggccatcctgcggcacgcccggcggcaggcagagaacatcggctatgatcctgagaggggcacccacttgcccgaatcacccagattggaagacttttaccgattctcctgggaggatgtggacaacatccttatcccagagaaccgggcccatctgtccccagaggcacagctgaaggaactgctggagaaactggatctggtgagcaccatgcggtccagcggggcccgcacccgtcgtgtccgcatgctgcgcagggagatcaatgcccttcggcaaaagctagcacagccaccgccaccacagctcctgtcactgaacaagactgtgcccaacggggagctgccagcaggatctcggggggatacagctgtcctggagcaggctcagcaggaggagccagaagaggaaggggacagagatgattcaaaattgcctgccccaccaaccctggagcctaccgggcctgcgccttccttgtcagaacaggaatcccctccagatcccccaaccctgaaacccatcagcgacagcaaaccttcaagccggttcctaaagtcccggaaggtggaagatgaggagctcttagaaaaatcagccctgcaactggggagcgagcccttgcaatgcttgcttagtgacaatggcattgacagactgtccctcacaaaccccgacagccatcctgacacccctctcggcaccgtgggccgccgaacctccgtcctcttcaagaaggccaagaatggagttaagctacagaggggtcccgatgggacccttgagaatggcgaggaccatggcccagaggacgatcctgcttctccagccagcacagaggatgaacactattcccggaagcggccaaggagccggagctgtagtgacagtgaaggggagaggtcccctcagcaggaggaagagacaggcgtgactaacggctttggaaaacacacggaaagcgggtctgactcggaatgtagtttgggtctcagtggaggactggcgtttgaagctggcagtggcctgacgcctcccaaacgcagccgtgggaagccagccctgtctcgtgtgcccttcctggaaggtgtgaatggagactctgaccacagtggctcaggcagaagcctcctgatgccctttgaagaccacggagacctggagcccctggagctggtgtgggccaagtgccgaggctacccctcctaccctgccttgatcatcgatcccaagatgccccgggagggcctcctgcacaacggtgtccccatccctgtccctccactggacgtgctgaagctgggcgagcagaagcaggcagaggctggagagaggctctttcttgtcctcttctttgacaacaagaggacctggcagtggcttccaagggacaaagtcctgcccctgggtgtggaggacactgtggacaagctcaagatgctagaaggccgcaagaccagcatccggaagtcagtacaagtggcctatgaccgcgccatgatccacctgagccgagtgcgtggctcccatgcctttgtcacttccagctacctgtgagagccgagctgggcctgtgtctgccttctttgcctctcctctgtccctga

SEQ ID NO: 190 - protein, 1147 aa, Mus musculus
MRKPRRKSRQNAEGRRSPSPYSLKCSPTRETLTYAQAQRIVEVDIDGRLHRISIYDPLKIITEDELTAQDITECNSNKENSEQPQFPAKSKKPSSKGKRKESCSKHASGTSFHLPQPSFRVVDTGSQPEAPPLPAAYYRYIEKPPEDLDAEVEYDMDEEDIAWLDMVNEKRRADGHSSVSADTFELLVDRLEKESYLESRSSGAQQSLIDEDAFCCVCLDDECHNSNVILFCDICNLAVHQECYGVPYIPEGQWLCRCCLQSPSRPVDCVLCPNKGGAFKQTSDGHWAHVVCAIWIPEVCFANTVFLEPIEGIDNIPPARWKLTCYICKQKGLGAAIQCHKVNCYTAFHVTCAQRAGLFMKIEPMRETSLNGTTFTVRKTAYCGVGSPLKGVSKKGKMSLKQKIKKEPEEAGREAPSITLPMVTVPQIPSYRLNKICSGLSFQRKTQFMQRLHNYWLLKRQARNGVPLIRRLHSHLQSQRNAEQREQDEKTSAVKEELKYWQKLRHDLERARLLIELIRKREKLKREQVKVQQAAMELELMPFTVLLRTTLDLLQEKDSAHIFAEPVPDYLEFISKPMDFSTMRRKLESHLYHTLEEFEEDFNLIVTNCMKYNAKDTIFHRAAVRLRDLGGAILRHARRQAENIGYDPERGTHLPESPRLEDFYRFSWEDVDNILIPENRAHLSPEAQLKELLEKLDLVSTMRSSGARTRRVRMLRREINALRQKLAQPPPPQLLSLNKTVPNGELPAGSRGDTAVLEQAQQEEPEEEGDRDDSKLPAPPTLEPTGPAPSLSEQESPPDPPTLKPISDSKPSSRFLKSRKVEDEELLEKSALQLGSEPLQCLLSDNGIDRLSLTNPDSHPDTPLGTVGRRTSVLFKKAKNGVKLQRGPDGTLENGEDHGPEDDPDASTEDEHYSRKRPRSRSCSDSEGERSPQQEEETGVTNGFGKHTESGSDSECSLGLSGGLAFEAGSGLTPPKRSRGKPALSRVPFLEGVNGDSDHSGSGRSLLMPFEDHGDLEPLELVWAKCRGYPSYPALIIDPKMPREGLLHNGVPIPVPPLDVLKLGEQKQAEAGERLFLVLFFDNKRTWQWLPRDKVLPLGVEDTVDKLKMLEGRKTSIRKSVQVAYDRAMIHLSRVRGSHAFVTSSYL

SEQ ID NO: 191 - DNA, 56018 bp, Homo sapiens
aaacttcctctcatatggtcaaatgtatgtgttaatctatccattccaattgtttctggagtcctttgtcttcctactccaatggtttcacttgagacctgccacacaattctcttccttgaatttcccttcattgtaatcctggggatatcttttgcttcttttttacatttaatcctgtattagtccattctcacattgctataaagaaatatctgaaactggtttatatatatatataatatattaaatatataatatatataaaaatatatattatataaaatatattatataaaataaatatataatatattatataatatattatatatataatatataatatatattaaataatatattatatatataatatataatatatattaaataatatattatatatataatatataatatatattaaataatatattatatatataatatataatatatgttaaatatataatatatattaaatagatatatgaggtttaattggctcacagttctgcaggctatatacaggaaacatggtggcatctgcttctggggaggcctcaggaaacttacaatcatggaggaaggcaaaggggaagcccacactatacatggctggagcaggaagaagggtgggagcaggtgccacacatttttaaacaaccagatctcatgagaacgcattattgtgatgatagtaccaaggggaagcagaaaatctgcccccatgatccaatcacctcccacccaggccccacctccaacactggagattacaatttgacatgagatttcggcagggactcagctccaaagccatttcctggatcccatgtattttacttttcttggtttttttttctacctcattttttgtgaaaaatgtcatgcagttatttcctgaggaagtatagataaatgttgtgaaatcttgaatgtttgaaaatgtctatactattttcacacttgatattttggctgggcatagacttttccattggaaacattgttcctcagcatttgaaagagttttttcattgccttatagctgcttgataacattctgattcctagttctttgtatctgacctgcttttcctttccaaaaactttttggattctctctttttctatcactagtgttcttggtttagatcttttcgcatttattgtaccagagcactgaaggagactttcattctggaaactcactaccttcatttctggggaaaattctcatctctttctagaactactgtaaatgggatgttgagcttcttaaattcatcctcaaattctcttttttattctcttttctgtcctattttccatctccttttctctctgggagagttgttaaacctcaccttctaactcttccattacagtctttaaaattttttcacatttttaatattcaagatttgctcttttctgactccttcttttctgtcctttcttcctcctttccttcctccttccctttctctctctctctcccctccccttgctatctttatttctttgagacaaggtctctgtcacccaggccagagtgcagtggtgcgatcttggctcactgcagcctcaacctcctgggctcaagcaatcctcccgcttcagcctcccaactagctgggatcacaggcacatgccagcacatctggctaatttttttttttgttagtagagacagagtttctctatgttgtccatgctgatcttgaactcctgggctcaatcgagccactcaccttggcctcccagagtgctgggattacaggtgtaagccacagtgcctggcctccccattttttttttttttttttttgagatggagtcttgctctgttgcccaggctggagtccagtggcactctctctgctcactgcaacctctgcctccctggttcaagcaattctcctaccttaccctcctgagtagttggggttacaggtgcccaccaccacgccgagctaattttttgtatttttagtaggtatgagattttgccattttggccaggctggtctcaaactcctgacctcaggcgatccgcccaccttggtctcccaaagtgctgggattacaggcctgagccaccatgcccagcactttttttttttaaatgaagacagggtattgctatgtcacctaggctggtttgaaactcctggcctcaagcgattctcccactctggcctcccaaagtgctggaattattaggcatgaaccatcaccccagccagctactctttgaggctcttagagatttttgtttgtttgttaagacttctttggttctctatattgttttccccattcttttttcttggattctgaccttcatgatactttcttcatatatctgttggtttttggttgtttattcaatgttaagaggtagttttttttaaagctgtttaaaactctatgtgtgttggggtaggggtggggaatgcttgataccaggtgagcttcagcataaggcaaaaggtgacaagctggatgttttagtgaagatgttccatcgccagtattcataaataggtcttttctccatcttcagagaggaatcatggtattctctaacattctgtaatccattgcttctcaaatcttaatatgcatatgaaacatgtagggagatcttaaaaagcagattctggtttggtaggtctagagtggggcctaaaattccacatgtttaaccaactcccaggagatgtcaatactatcggttcttgaacaataatctaagtagcaaggttctggctgcgggtggtggctcacgtctacgaacccagcacattagaaggccaagttgggagcactgcttgagcacaggagttcaagaccggcctaggcaacaaagtgagaccctgtctcttaaaaaaaattatcgaggcatgatgctgtgtccctgtagtcccagctactcaggaggctgaggtgggaggatcgcttgagcttgggaggttgaggctgcagtgagctgtgatcacaccactgcattccagcctgtgcaacagagcaagacctcatctcaaaaaacaaaaacaaacactagcaaaattctaaaataaacctggcttccagtgttttgcaatgtgattgggggaagaggcaggaccactaagaattttgatctatgaaacatttatttcaactaaaaggatggactgactagaaatgttttcatgaaattttctcttagcccccttctgcaccaccagattccagcaatttgtaccagatttcccctccctcatcagtctagggaagaacatgtgatggtgatgattggggctcgggggagcatcttattatttagtatgcagagattccctttaatttccgttttcagtatgacacttcatcgctgtcttcattggttcctggtggccccaagtctagaacttctttagttcaatttcttgagatagtaaatctcacctgctgttgttttccctcattctctttgttcttgtggatttcattgtcttgtggatttttttatcctttactaacattattgaagttaggggagggagtggggaccaatgcatgttgtcaagccagacattattttaaccatgcaatcattaaacttttccagaaatgtcccactcattgtggactactctttctacaatgtacaatgtaaattgtaaattgaatttaaatttgccatcatttcattgttttctatttgtttcacctttactatatttccttttctttccttgacttcttttaggttggtcgaattttttattctttttttactctgtactagtttgtgagttacatcctcattttttcattcttttaatgttaatgattagtctaaaaattgcaacaggtatgctttatcaacttaattgtggtaaaatttatgtaaaataaaagacagctactctgtacagtttaagttttggcaaatgtatatatacctgtttctccaccactgccatcaacttacagaatgtttctatcactccaaaaagtttcctcatgccctttatagtccctcctccccttcacatccaggaagccaccaatctgctatcattatagagcagtttgcattttccagaatttcatataaatggaaacatgtattttattattataggtattctggagtaatcaaaagctaatattaatcctttaactttacctttttctcagagtattttaatcctggaattctctaaaatcctctaattcactgtttctcaactttaatatgcatataaattacttatggaaatcttgtcaaaatgcaggttctagtttagtatgtgctattatttttgtgtattttctctccctttagtaaaattatgccaagaagatggctacttttagggttggtacttctgctaaaatatggaattatattttatagtgtcctggcttcactcacagttaagagtttaggatttaatagaaatcctaattaaaggttgaaaagataagacattagatcaagttgaacaatttatacttgtcacatactacttgctttcatgcttgcttggtttagcattccactgagtatatggtaaaatgttctagctagaattcaagttcagaagataatgcaagccacactggatagctaatttaaaccataccgtatcacactctcttgcctgactagaacttaaagcatggaactattgaagtcatttccctgttccaaaaatcatcagggtctcctgccccttcatgtctagctccctacccaaccaacagtctccatgctctgactttaccttaccagccttctctctcatatccctcatttttgggtcaatgggtaacccactgtttcctgaaacaatcttatggcattccatgtgttaaagaaaagacagcagaccccaaatggagtcattcatgctgagaggttccatgacaccaaaccaaaacctgtattttactgtaagatctgactcttcaagaaatcaggagagagatgatagtcaaatcccattaaaccaacaagatttcatttacattcctataaagaaaaataatcttgaaaagaccaatctgctatttgctcattgttcctgatttatttcacttctttctgcctataaaactcacctacttgtttagctcataggaactcctttctattttgtagactggatgttgcccagttcataaacagctaataaagccaattggatctttgggactcatttgttgaaattttattctttgatacgttcttcctctttgctcatgcgggtggctcagcctggaccacactccctctaccatctttctagctgacacacctacctgagagctttcaggtagagctcagatagcactttcttcacagagccttccctcttctcctaaacagacgagctcactccctcctccaaactttggcacttcgtttgcatctctcttgaagtgcttatattgtagcacgttccagttataaatacccttgctttatactgtgattagaatctaaatgccttcaagtctgcaagcatactcttttcacctttgtggcctttacagccataaaatagaaccttaccagcagctcacaaatagtaattgaataaatatgtatttcagtgtgaccaaaagaggttccagagaacttgagctgatttcatcatttcttcaatcctcaggttcccacctccaataggagctcccgagcaaccctttgccacctcttaatttgcaatgattgtaccaaactgtgagaacctacaaagtttgaacttagattcttcttcaatcttctcctttgttcttatgtccaatcagacaaaacagttgctttgtcatctgatttctgatttgacctttccttttcctctttctctaacacattttccatcattctgcttaatgcctttttattttcataatgcctaattacctatagtaaactcttccaggtttaccggatctcctgttctactttctccaatacataaagaggataacagtaacattttatagagttagtaagttgataaataagatatggtgtgcatattggacctagtttgtacatgtacctactaccccattgtacaatcttctcctgctcatgtcctctggttttaggagttgatacatgacaagcagcatgtccctctggccacagttattggctcaggatggctgagaaattgcaagatacagtatgctgatgacataattcgagtcctttgactcgatcttgtctatagctagatgcacccctggactttctggttatgagagtttatttcctttattaaactcacttaagttggttttctgctaactgcaacaaagatctttaataaatggagtatataaagcactaagcacagtaccttgtacataagtgttaggtattatttttattatccctgtccccttgccatacctcctacccaattcaatctttttcttatcatctgcccatacataccagctaggataatttccgcattattccctgcatattttccctttgcctggactgtcctgtcaccaacccaatgtcactttacactcttttcaccagttcacatccatcatgatttagaacttggcttaaagaagtctcccattctccaagaagccttctttgaataatggtggctccatactcttcactgccttatctattttttcttgtatgtgttttctacttatttctaccattctggattgcacactactcaaggcaagaaaaaatatattctatctatacttatgatcattagtccctttctaggttgagattttgtcattattttccaaagaacttgtgcagtattagacacactctaagtggtcaatgaatacgttttagaaatacataaatggaattaaatctagagagtgtggtatgttactctatttaagacctgttgttaacctagctaaacttttcccattttccaagcaaactttacattcttaaaccattttaattagtgtaaaagtatcggccgggcgcggtggctcacgcctgtaatcccagcactttgggaggccgaggcgggcggatcacgaggtcaggagatcgagaccatcccggctaaaacggtgaaaccccgtctctactaaaaatacaaaaaattagctgggcgtagtggcgggcgcctgtagtcccagctacttgggaggctgaggcaggagaatggcttgaacccgggaggcggagcttgcagtgagccgagatcccgccactgcactccagcctgggcgacagagcaagactccgtctcaaaaaaaaaaaaaaaaaaaaaaaaagtatcacaatgattccaacctcaaacattcctcccaactgtggtttcagaattcttttagtcaagtatctaaggaaggaatattctattaaaaataatttaacaatcaatcaaggcctatttttttccttatcatccacgttattaatccagtgggtactgcgtctgacccctgagaggtttcttggcctgataaactaatgacaatagtgaagcattaacaaagatatcctgagatgctgaaaaaaagtatgatggggaagtatgaaagaaagaggtggggaaatggtgatttttttttgtattcatgtttcttttagttttaaatggtaaaaccttctcctatcccaaataagttggtttctacttacagctggaaggttcttaaaaacaactatttggaatcaaagatccatgcctctgtttgttgaatttaattgctgtatggtttattggaaaggccaggggtggtgaatttaaaccgtttaaaatagcaaacgattaaagtgaattaaatttagtgcctctgagatttttgatatatgttccaaatttgtttttaataacataattgttccatgttacatttaagattccatcacagggaactggttacgtgtgcagttatgcttgtagaaaccaattccaaatgtcaaaaattaaagtgagggcaactgtaatgatatcattaaaaaagtagaagttgaaaatggaagagaaacacttaggttgaataaggtcttaatatgaaagctttgaatagaaaaacctgaaaaaaatcacatgcattaggttgacttaaggccttttcaacagcatttaaatcgttgacttacaagtagaaaccaatgcattttctcaaggtatttattcattcattttagtggaaaaagatagctcctgatcacgcaaatgggaattgtgctaaataaattttgagaacatccatcaagaaataaaagttactagtcatatgtataaatgattattatatttcatgttttaatagtttctgttagttttcagactttttttttcttaactacaagtactgtaattgcaatattttcttgcctctggggctttctcttccacaattaatcatctttttcttccacaccttccctccaaatgattattccccctagcttcagaacacttgacattaattcatactatttcatcttcacagctttcaaaacattgtcctgcccttgcttagctccacgagccaccccccttgcatttaaaaaattggttaacagaagcatttttgtactatctctttgccagaagatgctatttacttggaaacaaattagcttccttaatcaaacttttgaatttgaaactctctatatttaaattccttagtataacatctatacttccaaagtagcagtatgttcactttaaacattcagaaaatttggatcctaagactttatccttcatccttctgactctagaatacatgtccttgatcatcagaaccaagaaagaaattgagtctcaccagctacaccacaagtgccagcagaggaaacactttcaaactgtcactcaccttcacatttacaggcagcttatccatacgtcctttataaacatcattatgtattggtgcttaagacttcagtcacatgaggtaagctttccagtttacaggcaaaagggggtggcaatggagcccttttctttatttttttgtttttttagatcaaaacaaaagccagtttggtctgatgctgccatttgtcaagcatcttttagaaagccgcctaatgcattaaattaaccaagtcaggtttaaagtgtttcccatgcccacagtgacagacgagttaccaggcatgcttaagcagactgtcaaacttttgtttactccttttaaacggaaagtcagattttttttttttttttttaaaagatgtgtggtgcggaacaagacgctcacctgtacacaacaaaggcaggtctttcccggctgtcctcactgggggaggggatggacaatcgctagacctttgtcctcaggtcctgggcatgggggttaggggagacgcgactttctgggagtcgtgcaggcacctgcagtcaagaaactacatattggttttgacctcaatgactgccctggcttaacctttggagaggccctttagttcggggagggggcttgctgctccaaaccgtagccacgtcacccacaaggactggggaggaaatgactgaccgctcaagagtcagggacccctgtctctcccaactagacccgaacgtccacagccctcttatcgggctcgccccgtggcgggcagggccgtggtgcgcagggatcgcggcgggcgcagacccggtctcttgctcggtgtccccgccgcgcccgcaccgccaccgtgaggccgagccggggatggtgccccgtggcggcggcggcggcgcctccgcgctcctctccgcaccgccccggccgccgccgcgccaggcacgggcggggggatttttttcccgtttccccctctttcgcgctctcgctcctgttcagcgggagagcccgcagagtcagggagggagcgagggaaggggtggaggtggcggggggaggccggaggggcggatcctgcctgggggctgatccctccctcccctcggccgggctccgtggcggcagcggcagcagcggcggctccattccccctcctcccccgggagcggcggcggcggccgggccggggccccagcgcgggccgggagggggcacggcggaggccacggaggcaggcgcgggagaagaccgcgctccgcttcccgggccgcgccgacctgctcggcggcctgcccgcccgcgcccaggggccccgaacggtggggccgggcaggcggctgaggtaatgggggcggcagcggggccggacagagcgggggcgggggcatcggggccttcggggaccagggactgcacggggggaaaccggagaagcggggggctttccgagcagggcgggggcggtgcgaaagctctctcctggagcgagggcggcggcagggaaggagaaggcgggtgagcgggggagctgagaagcgaggaccccctcccgcagccgccatcttgtctccccccccagccctggattccgagccgctaagccccgcccccgccacgccttccaattggcctggccagacgagagtcccgccccttgagcggccctaggtcccctgggtccctctgacgggcaggtgacgcagccaatgggttctcgcctctccgccccgctcattcgctggcgctcgctttctctgtctgagggtcggactccacgtcaggctgtctctggtgcgctcgcccctcccctctgaggagatgttatttccctcctttcttctccgaggggtcaagattcttctggaagaggtgcccccttaaaggagcaggagccttggctggggtcctccttgtctcctgagtatcttgtgtgaggtgcaggggatacagtctaattgcagaagctcctcattcttcggggacctggatggggtgggtgagcgaggggtcagggggtgccgaggggaaatctgggggggcgggggttgttggagatattttggaggtgtgtatgtgggaagggctgtgtaggttgagaaactcccgccaaaaaactcgtctagactgtaagctccttgtgggcgaaactcttttcatttccctcatcagcagtcccttccccctctagagtttctccccggtgtctggaggcgtgggtgggacaaaacacgtctgtgtagagtcttgcatggtcgagagatgcttgagcagccgaggaggtggcaggtggggaaggagaagatggagcggctttcatgaaagtgggcgccgcaccgcctgtctgcgctgtttggggtcggtgtggaggcagatgttctcacctcttctagggcctcggtgcctttggaggggtgggtgatgaagcaggtctgttggccctgtctgcccccagggacttggcatttgtaaggaatccagtagccaagggcctctggaacccggacagaattgctgcgatgattctgtttcctttggctccaaatggggtgtgtgccagcccgcctggcactgctcctcagccaaattggttttttgtttgtttcagtcacactttgggattggaaggcctttcaagtaaagatgttaataataccttattaacaagtagcacctagagagctagattgtgttaccctcattttactgatggagtatggaggcatagagagcttaagggactttctctaggtcacagagggccaagattagaacctagattgccccagagcctcgttttgtaccagaccatagcacctctgtggtgttcttaattcccactgagaggaattgagcatcggaagacctgggttcaaattgtagcgttatcacttactagctttacgttgagtgacatctttctgagcttctgtgtagatgataatagctacaccatctcctaaggtagttgtgagaaatattaaaagtaagagggctttgtagtttggaaaaagtgcttttattatcaccgtctctactttatatagatggtagaccctgcaaccaaggcgatgaattgtttttctctttgaaatcttctctttgttcatatccttccaagtctgcccacaccatggggccctgtatccccaaaggtctctcctggtggtgacagccttggtaactgcctaccgcagctccttatgagcttgtcatccagagaatgatgggggaaactaggactttctcttggctgtacaaggatagactagatatgagtgttctgggagagacttttgaggtaacagaatgcattgagagtttacctcagatactgcccagatcatcttggccttcggtcgaatgaaggtcctagacaggccactataacttcagagatctcttggagccactctcagagcttctagggtttgtttctgcctggaaatgtactagttggtgtatcctggatcaggggttcccaacccccaggccgcagactgtggcctgttaagaaccaggccatacagcaagaggtgagtggcgggcaagcgagcattaccacctgagctctgcctcctgtcagatcagcggctgctttggattctcataggagcgcgaaccctactgtgaactgcgcatgtgagggatctaggttgcatgctccttatgagaatctgactaatgcctgatgatctgaggtggaacagtgttcaccacccaccctcatctgtggaaaaattgtcttccacgaaaccagtccctggtgccaaaaaggctggggactgctgtcctggatggtgtcttttgtagggaataccctgcatactgtagtttgaagcccttagaccatgtatcatagatatttcagatgccttcaccccttcacctctaggcagggtcaaggagtagggtttctgatcgtggtaagaggtattgggagaagactctagtgacttttgatcctctgatggggcccattgttcacgtacagagcttgacagtggatgcttttcttgttttcttttctaaaccgttaactacatgtgttttccatagttagctgtcgcccagctttatgtacatcattagaacattagatctttccccatgttacactgtaataatctgtttacttttctgtcttttgagttagacagggctccttgagggcagggatcatgtgtgtttgatttcttctttcattcaactaatacttattgagtggttacttaggagctaagcactgctccaggaactggggatgcagcagtgaacaagacaaacaaaaattcttcccctcatggagcttatattctagtggaaggaaggaaacaataaacatagtagtaggtaaattatgtagcatggtataagatgatgaatgttaaagggaaaaataaagcagaatgaaaggtagattgctggtggaggaaaaggatttgcaattttagataaagtggtcagagaaggtctcactgagaagtgttgttcacttgaagaaatgaaagactcaaaggaagtgaaggagcaagccatgtggatgcctgaggggcaagttgttcagacagagggaaaagccagtcctcttggtggatgcttgatcatatgggaggatgaatgggtgcataagggcatccaactcatagtctcctggccttctctccttaggcctgtcccctcagttcccaggtgccatgaggaagcctcgtcggaagtcccggcagaatgccgagggccggcgttccccgtccccctacagtctcaagtgctcacccacccgggagaccctgacatatgcccaggcccagcggattgtcgaggtagacattgatggacgcctgcatcgtatcagcatctatgacccactcaaaatcattactgaagatgagctaactgcccaggatatcaccgaatgcaatagtaacaaggaaaacagtgaacagcctcagttccctggcaagtccaagaaaccctcatccaagggcaaaaagaaggaatcctgctccaagcatgcatctggtacttccttccacctcccacagcccagcttccgtatggtggactcaggcatccagccagaagcacccccgctgcctgctgcctactaccgctacattgagaagccacctgaagacctggatgcagaggtagagtatgacatggatgaggaggaccttgcctggctggacatggtgaatgaaaaacggcgagtagatgggcacagtttggtgtctgcagatacctttgagctgctggtagaccggcttgagaaagagtcatacttggagagtcgcagcagtggggcccaacagtcactcatcgatgaagacgctttctgctgtgtgtgcctggatgatgaatgtcacaatagcaatgttattctcttctgtgacatctgcaacctggctgtacaccaggagtgctatggcgtcccatacatccctgagggccagtggctatgccgctgctgcctgcagtctccctcccggcctgtggattgcatcctttgccccaataagggtggcgccttcaaacagaccagtgatgggcactgggcccatgtggtgtgtgccatctggatccctgaagtctgctttgctaacaccgtgttcttggaacctattgagggcattgacaatatcccgcctgcccgctggaaactaacctgctatatctgcaagcagaaagggctaggtgcagccatccagtgccataaggtgaactgctacacagcattccatgtgacatgtgcacagcgggctgggctcttcatgaagattgagcccatgcgcgaaaccagcctcaatggcaccatctttacagtgcgcaagactgcctactgtgaggcccactcgccaccaggtgcggccactgctaggaggaagggcgactcccctagaagcatcagtgagactggcgatgaggaagggctgaaggagggtgatggagaggaggaagaagaggaagaggtggaggaagaagagcaggaagctcaaggcggggtgagtggctccctcaagggagtgcccaagaaaagcaagatgagtttgaagcagaagatcaagaaggagccagaggaagcaggccaagacacaccctccactctccccatgcttgctgtcccacagataccctcttacaggtaagcatgcccagaagggctccttagggactcatggtttcttcttgggttggtgttggccctgtgccaggccttcgctaaacacagttggacactatatcctcctccccgaatttaaactcttccttttgaccccaggctcacctggcctggtttgtggttttgattttgccctcagagtaatgtatttcctttagttcaaagtgaaataaaacacttaagttacttagaaactcaggtgataggatatctaagacagtatttttcaataggggcactaagtgacattttggacaggataattcttcgttattagaagtgtcctgtacatttctagatgtttagtatccctggtctttgtaaatgccagtcgcatcccctcccccattgcctggtctttgtgacaaactcaaaccctcctcatgcatgttttcaaaaacccttggggagggtagaactaattacccagtgaagaaccactgtttcagaggatcggcatggccatctgctgtccagcaagttctgtcctgggtatgaggggggtggtggtgtggagagaacatgctattcctcctcttgaagctttagatttagggataagaggatcattcagttcagctgtgtagctaagctctgtggaccccccccccctccgcccccgccattgagtctgtagagagcccatggtacctgttttaaaacatcagagaggtacctggaaccattggagggatgggagcttggcagagaagcaagagatagggaagatttcctagcagagactcatctcaggggtggtgttcattaaacagtatacactgttagagcaggaaggagtcttggagactgttcatctgatgtagtccttgcaccttctcccacacccccagatgaagaaactgcggccaagggaggtaaagttgttcactcctttattcattcaatgatatatttattgagcacttaatacatgccatgtcctgttctaagggatggaaccaggtggaaagtgacagaccctataccacaagagctggggctcatgatgcctctaggttgcattcctgtagtccgtctctcttgatgagaagggtagagagaaaggagtgctggggaaagagttgtgtgagagctatgaataggcaaccagacttgccaggctgggaagaagacataagtgtgagatcagaagggggaggctcttattgccagttattacccaagttagaatttcagtgactctgtatgtgttttctagtcacagagctgttctaggttattctttttcctgaggtaagtgggtggatgcttagttcccatctgtagggtggttttaccctgaggctagaatctttggttgacatatatgttgttctagatgcctcttgctggggccagcagagcttgctggctaagaaccagacaaacctacatttgaaacccaattctgtgacttagtacctttgtgacttttggcaagttgcttagctgctctaagccttagtttatttgtaaatgaacccaccacatagagttgttgtgagaaataaatgagataatataagtaaagcacttagcacagtgtctggcaaatagtaagtgctcaataaatggtgactactgctgctgctgctattttattattgctgttcttttccctacctgcacaaatgctgttgggatcctccatggccaagaggtagagggagggtgctgcctacatctgggcaggtgtgcttggcatggacattggtcgggatctgtcctttggggagaggcctagttcttgattttataagcttggctttggggcaggaatgtctgactgtggagaggagcaaggcctaggtgagcaacgtcctgcccaacatgcccatccttctaaggtttcaacttgtttagctgtgcttatctttgtttcaatggagtggcatgaagagaaaaaggagaggaaacaccacaagagcactgaggccttgcttaccctgtggataaccagtctggggatgtaccatggtatagcagagagatcgtggattcaaatccaacctggatccaccatcttattagctgtattagttactttgacagtttattcagcttctgttcctatgctgcctttccatcttttgtaaaatggaaataatgatacccaccttgcaatatggatattaaagacagatattataggcttgcattagttcctctcctaccccttttcctcccccaaggagttactggcttaaaccctgaccttaagacttttgagtagtttagccagctgggttttcacatttcccatcctcttacatctttagatccaattttttttttcatttggttcaaaattaaacaacatttttaggctgttgaggtttataccatgaaaaaccagacgtcaaacaagtctaaggggttgcattgggctcagcctggttgtgggctaccccctggtttgatgggactctcagccgcagaaggcaggaaatagtggccacattaaccatagcttaccccagttcctgttccctttcgctgcttttataagaggaggctgggggtattgaggcataggcttgtttttcagtccgtacgtggaacaaggaagtccaggaccataggaaacgggactctgggagatggttcttttggaggattaggactgcaaggcaagaggtggaaaagcaaatgaaataactcatgctgaatctgagctgcttaactttactgtccttttcaagcctttctctgaggtgaggtatttggccattttattctgtcttcctgtataaggttcagaaatgaaccaggtctggataggatgcacaggctgtaatctgggctgcccactgaccttgtctttcacttccgtgtgcctctactcaaggttgaacaagatctgtagtggtctctcctttcagaggaaaaaccagtttatgcagcggcttcacaattattggctgttgaagcggcaggcacggaatggtgtccctcttatccggcgcttgcactcccatctgcagtcccaaagaaacgctgagcaggtaggtgcagtggtgatttgaggctggtagagggaggtggagagtgaaggaaaaggaatgatggttggggtggggctggcaccccttcttgatccctccatggagcctttgcctacctgtctgggtggcctatcccaggaacaacccccagcactacagagatcttcaagcagctccttctggatggatgaggcttgactttgtagagaattctaggggagagtggagagcatgcgtagctttccatatatgtggggaaaatcctctagatgtagcagaaagccagaagtaggctgaatgagagccagggtggccacattgtgttaattaggaaaaggtgccctttcctcaagacattatactgccatctgccaaaaaatgtttcatagtaaatacacaaatttacgatctaagttgtagcacacagcctgtccaattgtggtggctgttagccattagcaactggagttgctgcatgtttaatgttttctgctcctaatttctcttattttaactctttagttctttctccccctttacctgttctattctttctgtctttaagtgttcccacactgctgctccagagatgaagcaaagctttatgtgagtctggtgccttctgcattctgtctgatctcacttttgccttttataactaaactcctgaagtataagcctgtatctggccccccttgaaccttttggtccacctgctccactgaagcctcccctaaaacatcagctaccttctcccaggaagtctttccttatattctcacctgattgatcattgggctgcatttgacaccacaaatgactttgtctaagagcttctctgtgataccacttccggctgcttctacctctctgactgtaccctatgctgatcccacttcttgctctttaatggtaacattcccagtggctctgctatctgctcgtttgcttggagaacatgtccaatctcataattgacaataactgtaatagcagctccagactttttgtcttgtcctcatcccttttttctgccatcagtccctcagggatgtttccatgtggatgttgttaatttgtaactcaaatattggaaattaattatcttttttcctctcagtaaacttatttccccatcattatggctctcccctccctcctggactcatatcaaaagttccccaccttggagttacttttgactctttactccctaagggccatttttaatcatcctttaagctgctttgggggctttatcaacatgggtttttgtcttcattctgcagctctcctgctcatccatgccctcttaatctcagcaatagctttctaggtgatctccagcctctaattctttctttgatcttcaactggtagtttcttattcacatgctgttgggatcctccatggccaagaggttgtagagggagggtgctgcctacatctgggcaggtgtgcttggcatggacattggtggggatctgtcctttggggaaaggcctagttcttgattttataagcttggctttggggcaggaatgtctgactgtggagaggagcaaggcctaggtgagcaatgtcctgctcttccattctcttacttcctcttccagaatatactcctctttctaggcaggcgaagttaaggctcttttgccttacatttgaagcttcttattagctgtatcctggatcttccttggcttttatagttctccagcatctctgttctggccagcctgtttcacttactaagcaaagaatcactaattctgcctctatatttctgcccctttcatccctttggttccagaagagaccttccttactactttgcccatccatgtctgtcacctacctgtatgttaaactctagtaagagtcttcaccaggaagcttctctgatctaacctccacctactcagatcttctattttgtatcctcttagcattttatttccagtttatattattagtttgtattatctttatgctaatatgcccttgtgcttcaagctctaggtctcttcccttcccctgactccaactgtaattttttctagggcaggaatcgtgatttgtttgttgttgttttaccagagtatattcaggcttatagtaagaaccttgctttgttttctagccaagtgaaagctctagggtgaaattcttttcacccctgaggtcagttttcttatgaaattctttctgacccagagggccatagctgctctctggcatacctggggatagggggaagcagtcccagatcctactccagcaaaggttattgctttataatgaagaaacagtgctgtaatactggggcagctcaggaggaaggcatggggtagagaggggtggaagggctcttggaactgtgggtcaaggaaggggacaagacttttacctgctgcagccccgtgaggcttgaacagggagaggacttttgcaagaaggaggttcctagtccctcttctcttccctcctgtagcgagagcaggatgagaagacaagtgcagtgaaggaggagctgaagtattggcagaagctccggcatgacttggagcgggcgcggctgctgattgagctgattcggaagagagagaagctcaaacgagagcaggtaaggaggagcccccagccctagggccctagttcaaggccactttctcccactattagtctagtattgggaaatctgggagcccctgccttatgctaggtttctttctcccctccctacccaggattgtaggctccaagatctgcctactttgtattagatgtggtgctactgatggtttctatagtttggatttcagctcctggtggcctcaagcataagcttaatatcatatgcctgggcctgtccctgtattttctgattcaggaagtctctcagagggagcctggccttgaggattttgaaaagcttcttagaccattctcatgggcatcatcagttgaaagcctctggcctgggaacttctgagggttcccacttgactcttaaacacttatggtcctgaatcatttacattttctgtttctcctctgttctaggagattttaagcccttgagcataggaaatgttgaggtaggtagtgtagcatagtgtttaggaacatgagctatggcaccagactgcctgggttgaaatcctgcctcttctacagactacctgtatgacattaagcaaattctttaatcgcttaatacattggttttctcacctggaatatgggggtaattatagagcctacatcataaggttgttttgaggattagatgacttcatcatgtaaagagcttagaacagtgcctggcacatagtaacagccagagaaatgtcagctgctgtcattattattattatcaatactctttgcttctctgaagtgtctactgcacatggcagagagcaaatactgttaattaagtggatgaaaagccaaaactgttctctctggtctaggaatagcagctgtcactcacatgcttcagaggccagggttaaagatgttcctttcttgccgggcacagtggctcatgcctgtaatccctgcatttagggaagcagaggcaggaggataggttgagtccaggagtttgagatgagccagggcaacaaagcaagacctgttctccacaaaaaggggaaaaaaaaaagatgtttctttctctttctccaaattctaattcagtggtcagccttagcacaaccccttttctagcaggccagtagcctgagtttcctcctcatagcctgggcagctcatgccatatttaccatggatggccatggaggacatctcaggaccttcttcaagggttcaaaatgtctgtgctgtcccaggcatgatcccacagctgaacttctcatctcatctctggttcagagaaatgagagagagaagaaggcctggtcctggggaagtaggcaggcctgttttgatatagccaaaaggtggaaattttctatagtcttaatttgtggcttcccaacttttcacattagggcatatgtagaaaatagcatttgtacagcatactactgtaagtatatgaagctacttgccacttgcgggggcaagcctggaggccctggtgaccccatgctgacccagatgctccaagggctgatggaatcagtatctcagcacactgggaaattctggttcaagcacattttacatcatcattgtgtcccttggactaagtcagacctgggttcaaatcctatctctattcttttctagacagatgaccttagactagtaactccttcatcatgctgtctctaaacctcagattccatatacatttttttaatttgtattttttttcttttagtccttggtgatccttgttctgatccatatttgtaaaatggggataataatttctgtttcagggttatcgtgatgattaattgaggtaatacaagtacagagttagtgtggcataatggccaagagcactcactgtagaatcactgggactgaatcccaactctgctccttattagctatgactttaggccagttacttagtttcctctagtttcctcctagttccttagttacttggtttcctctttgtaaaatacctcatctgttcctacctcatatactcatttattttacataaaatgcttagaacattacctggcatttagtaagggctatagaagtgttaatgattataattgtaatgataattattattgttactgtaaattttagtatgatgtttggtacataggaaacaataataaaatagtagctgttggtgtcattattcctaggctaaaggttgggtgatagcttctcatatactggtcagcttaatattctatgaaaatttgttgtacaagattggtaaaagtcaaactatcaagaaaaagtttcagtacatctttgcaggggatgttctgatctgatctcaccccaccttccccacaggtcaaagtccagcaggctgccatggagctggagctgatgccattcaatgttctgttgaggacaacactggacctgctgcaggagaaggatcctgcacacatcttcgcagaaccagtcaacttgagtgaggcaagttccccctactttccaagtagtaaattcttcttgaactggaacagggtctgagtaggctaggaaggagttgggccacagggtgtacaaaaccaggggtaggagggtgggtctggcaaagctagtagacttgcccttgatgaggggtcagcaggccagggtgggccaggactgtaggtctttgagttagcctggcatggccaaatcagaaattgaggaggccaagagtattggtgaagggtgtgtctgtttggctagtaaatggttgttgtaattgtacaggttttatatgtttaggttccagattacctggaattcatatccaagccaatggatttttctactatgaggcggaagctggagtcccacctgtaccgcaccttggaggagtttgaggaggactttaaccttatagttaccaactgcatgaagtataatgctaaagacacaattttccaccgagcagctgtccgcctgcgggacctgggaggggccatcctacggcacgcccggcggcaggcagagaacatcggctatgaccccgagaggggcactcacctgcccgagtcacccaaattggaagacttttaccgcttctcctgggaagacggtgagaggcctggatgggtggggaggagaggggccaggaggaggcacaggaacagagtctacagagtgagggatcagggtggtccttggggctataggtagactccaggagcaaagctgagggtgagcacagactgaggtatacctttgtggctagaatagttctaagggttaaagtttaactaatgtactctgcacttcttaagtggtagaaaaggggaatcaggtactagtggtctgtttgaaaagcttaaagcctcatcagaggtcttcctctcttggatcccctctgtatggcattggagcatgggacagggagagtgcattgctggtgtgtgtttggctcattcagaagattgcaggtggaggaccagaaaaatggaattgcctctgagccccacacgctgcctgtccctgctctctgcttctcgatggcagcagccagtcactcaggccagggtattgccaagctgcctcatgcctgctccatggagcccataatcgtgactgtgaactgcttcctgcagacgtttcccagattctgaccttgcccctgtggctgccttctgggcagtggtgttgcagggccaaggcccacagtgacgctgctggaagctgctggcccaggcattccaagagagagttttgcatccgaaggattcggcccctttctcttgccctgtgctgggcaggtccttcagccccttctgtcctcccttctccctggcagtggacaacatcctcatcccagagaaccgggcccatttgtccccagaggtgcagctgaaggagctgctggagaaactggacctggtgagcgccatgcggtccagtggggcccgcacccgtcgtgtccgcctgctacgccgggagatcaatgcccttcggcagaagctggcacagccaccaccaccacagccaccatcactcaacaagacagtatccaatggggagctgccagcagggccccagggggatgcagctgtgctggagcaggccttgcaggaggagccagaagacgatggggacagaggtgagagatagtcacaggcaggcagggggttggagggtaaagagggacaaaggctaagctgaaatatcataatgggggtattctttctgagtttagatctgacacttgtgggcaagcaaaagtgcttggaagggccacacttccatgtatacgcagggatgatgttcaaaatatttaacaatcactagagactaaaatttatccatctcagtagatgttggctgttatattggagtgggctcccaaaggcccctgttgtggatatttagttgctggattgtggggagtttcaggtgctgcagcccagcagctgtttattagccaattaagtatgtcagtattttgcacctgatacagccgtattgtacataccagttaaatatcagcctaccttgtaacatcacgtggagagactctagagcaggttaggttggggtgtgaggtgatagcagagaaggaaagaccctgggcttttgagccacctcatggtttttaccccatctggctgaatctacaggcccatctcaagtagagaggccagactataaaagatagttggtttccacagtttttcttgatcttgagaaaagacaaaaaaataaaaataaaaaagaagaaaagacagccagggaagtgactctcagaaacccaggaaccttataagctaagctgcttctcattcttctccttcactggggatggaattgtctccctcatacctgccttcggatccgagcctatagcttgggagggcctgtcacgcacacagtcgaaaaggctggaagttacttccaatggataggggcccaaattgtaggtaacagcccattttattttaggttggcagagaatggagacatagttgagagatcacatttgacatcagagggcttttatgtccattgtgactcctctggactccccgtatgacagtcagcatgccatttgtatccctacttctggggctgtggcagtacagagttgtgcccagtaggccaacagcatcacctagaaaaaaaaaaaaaaaaaaaaaaggtgtagcctcacctcccatagattcagttagggatgtctgggctttggcttggaagtctcaatttttaaaagtttcggccgggcgcggtggctcacgcctgtaatcccagcactttgggaggccgaggcgggtggatcatgaggtcaggagatcgagaccatcctggctaacaaggtgaaaccccgtctctactaaaaatacaaaaaattagccgggcgcggtggcgggcgcctgtagtcccagctactggggaggctgaggcaggagaatggcgtgaacccgggaagcggagcttgcagtgagccgagattgcgccactgtagtccgcagtccggcctgggcgacagagcgagactccgtctcaaaaaaaaaaaaaaagtttcaaggtggtaggtgagcacacatgtttggcaaccactgatttaacttacttggtctcgtttttcacatttgtgaactttttctgcctgctgtacttgttcttacttgggtgatgtgaaataaaatcgattgacagatgagaaaactcttgagtccagtgagaattgtagatacctaatctgtcaagctgagacttaacctatttattgattaagcatgtggctttctttgtgtagagcaatggtttgcaatcctcacttcattagactcacttggtaagctttaaaaaacaaaataccctatctttacaaatttggtttcagttggtatgggatggagcctaggcattggaatttttaagaaacttcctatgtgattcttatacatagccagggttgagaactactagtgtagataaaacttacttctcctggggatgggtacagtggctcatccctgtaatctcagcactttgggaggcagaggcagggggattgtttgaggccaggagtttgagaccagcctgggcaacacagtaagaccctgtctctacaaaaatttttttgaaaaattagcctagccaagtgtggtggtgtgtgcttatagacctagctactttggaggctgaggcaggataatcacttgagcccaggagtttgtggttgcagtgagctgtgatcagaccactgcactccagcctggtcaacagagcaagatcctgtctctgaaaaaaaaaaaaaacctaatcctcctttctctttgcttcagatctaagaccttgaatgcatctcaagccttataacagccaatgcttttggtccttggttgtcagtgtcagtatctagcttgtaggagcagactctttctaaaatgttcaagcagattctctttttttctaatagatgactccaaactgcctcctccgccaaccctggagcccactgggcctgcaccttccttgtctgagcaagaatcccccccggagccccctactctgaaacccattaatgatagcaaacctccaagcaggttcctaaagcccagaaaggtggaagaagatgagctcttggaaaaatcaccactgcagctagggaatgagcctttgcaacgcttgctcagtgacaatggcatcaacagactatccctcatggcccctgacaccccggccggtaccccacttagtggtgtgggtcgccgcacatcagtcctcttcaagaaggccaagaatggggttaagctacagagaagcccagacagggtcctggagaatggcgaggaccatggtgtggcaggctctcctgcctctccagccagcatcgaggaagagcgccactcccggaagcggccaaggagcaggagctgtagtgagagcgaaggggagaggtccccccagcaggaggaagagacaggtgaccctgcctgtgacttctcttgatacttcgcatctgcttttctgctttgccttgccaaccagcaccttccccaattggccatctctctaatggcaccattggacagcaatagtagcattgagggcaccatagctcacagttgggcctggcatgttagtagcagccaggggaaataggctttgagcaggtattttccagagagccagattgtgtctgggattcattggccctgagggtaatgcaatgttgtataaagtaaaatgattcctaccttcatttcagttcattcatcaaatatttgtgttaggcactgttctaggcattgggggaaaaaatcaatgagcaaaacagacaaaaatctgctctcttatgggggaatatattaaaagcaaatgagtaaaccgtatcttgtattagaagatttggagaaagatccagcagggaaggaatgctagagtggtcttagagagggtggccaggttttctaaggaggtaacgtttgagtaaagatctgaaggagttgaaggcatgagctatttgtatgtctaggggaagaacattccaaaaagatagactagaaagtacataggtcctggaggtgggaacatgcctgcatgtctgaggaacactgagggaaccagtttggctgcagcagagggggtggggtggggtgaggtggtgatagaggtaggtagtggaggttccatcactaaagagagggtttttttttgtttttttgtttttttgagatgagtcttgctctgtcgcccaggctagagtgcagtggcatgatctcagctcactgcaacctctgcctcctgggttcaagcaattctcctgcctcagcctcccaagtagctggactacaggtgcccaccaccacgccttgctaatttttgtgtttttagtggagatggggtttcaccatgttggccaggctggtcacctgacctcaagtgatttgcccgcctcagcctcccaaagtgatgggattacaggcatgagccaccgcgccccacctaaagtgttcttaatatacatccagcaggagctagtcatgagtagctgtgaggaagtaataaaataagtcagacttaattccagctctggaaggttcacaggccattgggcaaatgagtctctcaaaatgtagagaaatcacagtggtggacagtatgttgttatttgtcaggtgagaggtagcattgctagaggtgttcagggaatttgagctgtaggagttgggctgagctggccctgtgggatgagggcagactggaaaggaatggttatgaaggcctcaggcctgggtgtgtgggaacaaggaggacagaatctctgtgagggacagcttagagaggggcttcccagagcatcaggagccaagactggatgggtgagatgggactgaatgtgaaggactttgaatgccgggcagactacttaggtcttggtgggttagggaagacccactttcttggcagggagggctgctcttggcttttgctctttgtgtccctcatgtacttttatgtggtgactttggactgtgtggccagcacttgcttttctgtcttcttgcctgacattttgttttcaacaataccttcccatctcgtctggccaaaacttttctgtgttaggggagtaagttggtatatagaggcaagagcttaaggcctggatttaggcatacctgcactcaaatccccaatttcttactagctgtgtaacgacaggaaaattaattaacttctctgagcctgtttccttattcttaatatggggtttctgatacctaccttgcagggttctaagaactagaaataccctttataaagcacttggcatatagcagtagatggtagcagttactgtcatcctgtcagttgaatcaggcttagccatacagtgctgagaacactgcattaaaagaatgaaagatcctgctgttgggaagtagctctgtacatgaggcccatccaacctgagggggcctgttgcttggagatactgctagaatcctgtctctcaccatcccagttgcctggcactcagggatacttctatacaaccttagttgaatctcacaaaaagaggtgttgatccttcgtaagtgaggcacccaagacacagatggcttcagtgatttaaattgtggtcataatgttagaggcagagccaggtcagaggatagacattgtggctcagacacctgctcttataggagggacttgcctcacagttttctagttacggtgtctgtaatctacagctttcaaatcaggtgcctggcccatctctgtacacctcttggctcagctgttagaattataggacttttagtgtggctagcaattggataaaggccaggcacagtgactcattcctgtaatcccagcactttgggaggctgaggcagaaggattacttgagcccaggagctcgagaccagcctgagcaacatggcaagaccctgtttctgcaaagttaaaaagttagctgggcatagggctcattcatgcctgtggtcacacctactcaggaggttgaggcaggggatcacttgaacccatgctattgaggctccagtgaaccttgtttacaccactgcactccgcctgggcaacagagcgagaccctatctcaaaaaatagaaaaataaattggatagataggagagtggaagccttcacttcaaggtcatatacctgggatgaccaaacagccttcattcgcctctgaagggctccccactataaacagaccttctctcatacatactgaatagtaagtaagtaaggtattatcttcacttcaccaaaggagaggtcaagagacctcaaagcaagagaaaaggaacctgtgtttcagagcccagcctagaaccccaggttctgactctccctcccaggaagttccgggctgctttagttccgctgaagagtgcccccatcctcactttggattagccctgtgagatatctcagggtgtggttgacaaagggcccttatccatctctagtctctcttgacaccacccccaaagaatcaaactagctgttgccagctgtgtgatgcataggttatgtgagtctttatctgaagaggcaaggtggttgggctcctgaaaaaggcagagaaggctacctgataatcgaggtttgaaattagaagcagatccaaggacttgtgagccagccagggtaggagaagtcttagtatctccctgtgtagccaaatgacagtagctgagtgagctgtgtgctatggtttccttaaacaaaaagcagaaggatgggaaggaaattgcagtgtctgctccttgccctagccagcaatatttccccccaaacttttatcttgatcagatcttctctatcacccaagacccatttctcacagggaaaggaatagccatcctctccactcgtcactgagccctcctgaggtggctgcctcaccctgtagcatgtgttgggaagggggatttctgcactcagactcactgtgtctgtccttggcaggcatgaccaacggctttggaaaacacaccgaaagcgggtctgactctgaatgtagtttgggtctcagtggtggactggcatttgaagcttgcaggtaagaacacattcccaaagctttgtcagcagctctgctacccctccttttactctccattcagctacagattgaacctcttcctgcttacctttttctctcttcccccactcctgctatttcctgaggcctcttatctgtaactctgggagttcctaggaaacagggtgacccttgactctcagatctgatctgagagaggaagagtagtgctgatgcttacagggtttgtggggctgaatttggactctagaggataagaaaagctaaatctcctgttgttcagtgaaattaacatttgagccaaagtcccctgctgcccctacacacatttagacaacccagccattacagagttggttttgctctttgccttttggggcgtcatagcctctttatagaggtgtggtgtaggtgtatgaaatgaccaagtaggaaatttggaattgcctttttttttttttttttgagacggagtcttgcttgctgcccaggctggagtgcagtggcccgatctcggctcactgcaacctccgcctcctgggttcaagtgattctcctgcctctgcctcttgagtagctgggagtataggcacgtgccaccacgcctagctaatttttgtattttagtagagatgaggtttcaccatgttggccagactggtcttgaactcctgacctcaagtgatctgcccgccgcagcatcccaaagtgctggaattacaggcgtgagccactgcgcctggcctggaattgccttttattcagacaaaggccccaaagctcttctgctgtccttgagctgaaaagagatggatttcttcccattcttttatctgaagggaggatttctcagaccagaccttaaagtttcttccaggcacaagagcttatggagcccctgctctgtgttctgtgttctgcaagacaccagggcggggaggactcttagaaatgagaaaccctcactgccacaaaggaaaagtgacttgtcctgaaggctaatgtcatggccccacccatgactgctgaatgggtcttaggttcagagtaggggaggaaaggtcccagggcagcaccagaagactatttgtgtttgaagtgcttccaaggcagactgggcatgtgttcttttaggcattcagtctacctgggctgtaggactactggtagggctgagggggtccccagctactcgttggcctggactggttccctgctgtggtttctctgagattcccctaccccccgccaaccctcagagttgccctagcttcctattgcagcctccagagatataggggaagtagatgggaaaaaattatcaggcacaggaaagagaaagatttcagaatcttacacgatgcttctagcctggccctgggttgaagttcctgactcccttcaaagataaggtacctggaagcccactttgttggggtcagggtaggattggacccatcaaactatccttttcttgctcttgactaaaagtgaaaggtgtgttgttggccccttcttctatgaagggcattcttttcagctatgagccacaagagcaagcaaggccaggctctggttagcctgctaattcaggtggcgtgtttgcctttctgcagaactccagtgcaatgcccttgatttatctggggccccttggaggaagtatgtattaatatttcagggtttaaaataggagatccaaaggcttcaactgcaagggttgtttttctttttccccccatactgtggtaataagtatataagggaagaccttatttattagaccagaatcatataatcccagaattagaaataaccttgaaagaactggtcactaacccatcccccacactccctttttcacttaccccttggtttatcttttctgatgattttctgagcaggttggtgctacatgtgctttctatagatcactcattcaaatattgataactgaacacctactgtatgccaggtactgttctaagcactaaggtgcctgttctcatgaagattatcttctaaggtgtctgttctcatggatatggatgttaaaccagtaaataagataactgtaggttgggttgtctgcttaggctggggtaacttggagaaagggctgaaatgcaggccatgattgagtcagttgtgcttttttctacaaatcaggaacatacagacctatttttggtgttgcatcctattttattgagctcatccttctcagagctcatcattctatagtacagtattagcagtttgtaatactttaagtaagacattaaaatttactatccttcgtatgacaataactacagctgtgtttattgactgcatggtatgtgctgtactgagagttttatgtgtgttcgttcattaatccttacaacaacacatggggagtgtaagcctcggagaagttaagtaacttgctgaaggttacagaactgataacaagagctgggttttgaacccagataggctccaagagtttaatttcttaactactttgctgtgctgtcttctgttgtatttgaagatgtctccccagattcttgatgtgaactttgatttgtttttctttttctcatcttgacgtgaactttgagaggctttcctgataaaattactagcactttacatttgtacaaggcctcaatttctctaatatgttggcagatttttatagggtaaatgggaactaaatcctaaatgtaaactgggtattttttgttttttcccaaacagtttctattttgactagcaataaaaactaccaacctaactactggttactgaaaaattatgattcattgggttttggttaagcaaagttttcttagcatacgttcctgataaagtcagttctgattcagtaaaacgggagtaccctactctccaaccagtccctactcctggctgtttcttatcccactaggggtttctttaagcatttctgcttttctgcagattgatgacctattctttaagcattttttagtgagaaaatttaaagttatataggagtaatattattttttgaagtttggatggaaaaaagtgctagccatatcatttttgcccagaagctacggtgtacattagaattgtatggggaacaatttgaaaatactgatgatgcccgggtgggcttcagttgcaacattgctttggtattgccattctaatttttgcttatcactttttagtctttgtgtaatatacattttgcctctttgcaatagtcatgaaacaaaaattggtctacttttttttttttttttttttttttgagatggagtcttgctctgtcgccaggctggagtgcagtagcatgatcttgggtcactgcaacctccaactccctggttcaagtgattctcctgcctcagcctcctgagtagctgggagtacagacacgtgccaccacggccagctaatttgtgtatttttagtagagatgaggtttcaccatgttggccagggtggtctcgatcttctgacctcgtgatctgcccagctcagcctcccaaagtgttgggattacaggcgtgagccaccacacccagcccactttttactttaaaaaatccacttctctctatccaagaaaaacttcacacataaaccatttggaagtgagaagtgcatttttttttccaatttaaaaatgtcttttctaattaaggaagtatgacatgtccactttagaaaatttggcaaagaggcaaatttttgaatctcaaaaataaattggtttctaaagaaaagcgatgtgaaccagagcaaagaattctgggcagatgtaagatggcccctgtcatggcaaagctgcttagacgctggaaggattgacaaatgactggtgtgacctttcctttggatgaagtccaaggttcctgagcagggaactgagcaactccttccaggttcagtccttccatgtagatgaaatggttcctcaaaacctcatgggaacttttcagtcaaaaacatgggttagtgtgagtttttaggggaaggtgagaaactgtcctccctgaagagtttttgcagctccactcctgtcagagaggggagaggggagaaggggagtcggcgttttagtcattgaaattgctcatttcacccctctctccctgctctgtgtgcagtggtctgacgccccccaaacgcagccgtgggaagccagccctgtctcgagtgcccttcctggaaggtgtgaacggagactctgactacaatggctcaggtgaggagcagtgttcaggcagaactgagggggccaggccttctgaggagccagctcttcaggctgctgcactgctggggctccgtaccaggcagccagtccttgagctcccccaaactcttgggcccttgggcagggagatggcactctcccaggccaatcatactctttttttttttttaattgcatcttaaatttgaataggttgtacatgcccatagtaataaaaatcaaaaaggtacaaaagagtgtataatgaaagctagcactcccctccctggaacatcaactgctagcattttcttttatatctttccagaggtaatccatatgtatacaagccaaaacttgcatgaataattaagagagtgagtggagaagcctaatatgcacatgttcctctaaaccattcctttttttccagctaataatatatcttggagatccttctgtgctttttattggcttcccagtgtcccattatataggaatgctatcatttgcttagccagtcctctaaaagatggacgtttagattgttttcatttattatcgtaaccagtgttgcagtgagcaaccttatgcatagataattttatatccatagggagcctatctatagaagtggaattactgaattgaaggaagtgtgtgtttgtagttttcatggatactgcctgtccccattcacaaacgttatcagtgatagcctgtatcactgaatctcgcacatacataaccctgtagttttatgggccttgtctccttggataaaaggaataaagggcagggcaggacctgggggagaggcctggggtggtgcttaggtgggacaggtgcagagcaggctgttctctgagctcatctctgtccagccctgctatacaggggtgtgtgctccctggatgccctgtctttgaagtgtccatctaacacacaggctgcagggcttctcttccttcgttcctttacccaactgctttattttcccttagcatcagtttctttctcgtatgtgtgttgatgaatgcatgcctgtgtgtttcattgctttctgtaactgtcagttcccaaaaggtcaggctcatgtctaaatgaatttgtacagcatctcacacaaagccaggagtggattggcacactttgtgcttctggtggtgacatcttattcttacttttaaaaccacatgcttactaaaattacgccaaaggatattgacctcccatagttccatcactgtaacatgattgtcttcatttttctgtgttgccttctgtttatttcaggcacatttttaacaaaatgctgacccaaacacatgcacttttgtattctacttttttcaatttttttttgtactttcttcatgttgacacataatctttatatatctcatattattggaacagtgtatctaacaatgcattataatttacttaaccattctattgttaggcatttgggttgtttccggcttttagcattatatgtaatgtagtgaacccatatttttgtttaaaatccttttattcatctttaaagttatttttctcagaataaattcccagggaaggaatttactggaacaggtggttcatacattttttaaatggctcttcagacatactgccaaattacattccataaggatgggtttggtctgtaattgcatcagtagtatgtgattgcaccagtttctactcagtctacctctttggtattggattttatctttttattgttactgctattgattcaataggtgcaaaatagtatcttataattttaatacatttttaaaaattacaagtggagttaagcacagtagctcatgcctgtaattccagcactttgggaagccaaggtgggagggttgcttgaagccaggagtttgagaccagcctgggcaacatagtgagatcctatctctacaaaaaaataaataaataaaattttttaaaaagtgaggtagtaatatttccttagaaataacaatttccaccctgttagatttggacttttttccttggttgagtgtggtcacctgcccattccagtgtatagatgtggggagggaaagagaggttcttctgtgtgttcagaagcatctgtgaagcactcattcacatgtgttagtgcgttgagtgcagagcaaagtaagatgaaaggatgcagtgcctgccccagggatacccagtctcatttctgacaaaagaaggcatgtgaaggacttgcagactgcttagctctgctgagtgccgtgcatccaggtgtcctagatggctaggtgtgaccctgtcagaaaataactcagttagcaagtaattttaccaggatgtcttccctggcatctttgtccatgaagcctccatcatgaggactccgcactcagggaggcccagagagcagtatgtggcattgcccaagctggattatggcccttctccctaaggccatgaggatgaagcagttaacatttttccagggaaagctgtcttagggttctagttcagaggtcggtaaactatggcctgtagcctatttttgtatggtccatgggccaaaaatggtttttacattttgaaatgattgaaaagaaaatcaaaagaagaatgatatttcataacatgaaaattacatgaaattcaaatttcagtgtccaaaaaataaagttttattgggacatagccatgctcattcatttatagattgtgtgtgtggctgctttcatgctataacaacagcagtgttgagtaattgcaacagaggccgtgttgcccacagaagctaaaatatttactatttggccctttacagaactagtttgctgacccctgatccagtctaacttctaaggaaaggagagggaaaaggaagggtggaggggatgttgtgactcattcctgggttgccccagtcaagtggaggccacaggcaggccttttgggcaccattccaagtcccctttgggtgctgtctcctcccctcccccacccccaggcagaagcctcctgctgccctttgaagaccgcggagacctggagcccttggagctggtgtgggccaagtgccgaggctacccctcctaccctgccttggtgagtctgccccagacgccaccctcctatctcccctgccttgccttgggggctaatctgattggattaagccagcagagtgtggtgggagtcagagtgtctttagctgtagaggggaggggggttttgccccagcctgagtgggtcaaactagcaaggctcccagcttggagcactaaaaataggctaaaagtatgcagatcaaggccagggttcttagagttttaatagcatttatttatttccttatgcataaaagtaacagggcccattttagagaatctttaaagctactgataatgcttagacgttttattaaatatttgtcatgctaagtccttgaaatactgaggaaagtatgattattacattttgtaagaagaaaactgatgatttgtggtcattcagctaataaatgacagggttggaatttgagcccagggcttaaaatgtgtgatgtcaaagcctgtgttctgagccactgagttcaaaatcatccacagtcctgcagggataacttggggtgtatatccacttactcttttacaaaaaatgtataaatatgcatatatatgagaccatattgcttttagcctccctttcacttaacagcatatcatgaacatgcacatcttatgccattaaacattcttcatcaacatcacttttaatgattgcatcgtcttcagttgtatgcatgtaccatattttaaccattccctagttggtcacttacattgttttgaatttttcactatgataaacagttggcaataaacatcattgtagttttacccttgtgcacatccatgattatttccttacagtgaattcttaggagtcccttcttggggcaaagtctatgcagaattctgatacaagttgccaagttgctggaagttcattttggtttatactcacaccagcagtaactaaacttttcatttctgtcatagtagtagcagttaaaaattcaatttttaccaccttgattgttatttctgaactctttctcagttggggaggtagtgtccacctagctctggaagataccactgatactaaacctttggggcatgtcagaataatctgtggaaatttttaaaacaatacccatatcaagtcacctccaccccagcgctatcaaattagactctctgaggccagactgaggcatcaatattttttagaaaacatcctagatgatctgtagccagggttgggaaccaccccaccagcctcttacatgtatacaggactctgggtttctcctagccccttcatatctgcaacttttaacagcagccttttaagataaggagaggaggaattctgatcctgtttggtcagataaggaaattatagctcaaagaggttgtattaatacagtttgttggaaccatattggaaaccatgttgcctactctactccctccttagcagtagcaggtggggaaaatccatactgtgacctagcagctgaagagttagggcctggggctgcctgccttcacagggctctctgccctgccagcggtgaaaccgcaggactcccagctcagtcattaaagaagtgattaagctgtgcaggtttggatttaaaaaacaaacagacagaatacctcacaatgcaaaaaaactagtctaaaactcgtcttttttttaattaccctcttaattatacattttgtcatgattaaagaaattcagccaccacctgaacacaacctgtgtttttattttggtgtatgctctcctagtctttttcctatgcattcttcagtatgtatttgcatccataaatagtggatataaagtttttaattttttctggctcttgtcttttttttcttgtcttttaaacattttttcttgtttttgtttttgtttttgtttgtaagagtaatatactgcattatagaagtttggaaaaatagaggcgaaaaaacacaaaccccaccattctaatgttgactccaagcattttgtatcgttctatttattgttcgcatattcatattatagttgtaataatagtgtatgtacacatatgttaagttttatcacaaactttgttaccatgttgttttacatttgcatagtattcattgaatgaatggaccatttattattttgggacacaaaagctgtcctcagttggcagacttacccaccttgcttttgccctcaggggaaatttttcacaatctaccctctgcaagcaccctgggttccaaggcaggaaccagcatgccttagtcaagaggaaacatatcagagtagcctcactgtcttgtttggtaatcaaggaagcttacaagggcttgtatggtggttctccttaagaccctttacttcaatcccaggagggacagacaggctgggagagagagttttgatcaaattacacacctggtgggtggggtaaggtggttcttccttagagtaaactcctaaccagaacagctgctttcagctgcttatcttgagagggatgtagtgaaattggcagacaagcaaaggtaaataatgagagcagtttattgtaagaaggggcccactgggacagcgtataggaagtaagattgctctgtctctggagaaggctgcttcctcagtaagttcctagtctttgctcccagagctattagctgtctgctctggaagcaggggctgtgtaggaggcagtgggctgtggaggcccaagccttgtttggttttagtaccaatgtggttttagccagctacattctgcttctgtgcttggtgttttcctcttgtcagctaacacctgttagcagacttctcagcatcagcaagagattgaaatgagatgatgtgtgaataattaggagctttggaaactttgaaagtgctccctagacctggattttgattgttgtgttgatgctgccaggcattttgctgagcacctgccgtctctgagccaggcaaggtggggctggatgccagaagcaaacctgaaggagaagggcccagctgctgcccttgtggagcttattgcctcaaggattaatgcctccagtggcccttgtttccacccacatcatacccccctctccatcaacctccaagctcattctctagctatacactgagcctcctctctgatcttaccatggaggtgtcacaaatatatctggtccatgtatcaggaaggattgtagtcagacaggaaggtagtgggtaaccagagacctcgttagaaccaactggatggccttcccgatgcaaagccttcttcatagccgtggtacctagggaaggcccccaaacatttgaggtgaattgcaaaggtactaaggggaaattgacaggaaaaaaaaagtgacctctactcttctgtcctaagggacattggaggaaggggtttgcctgtctggtctggacatcaaagatatcccactcaggcctgatactcccctggtgtgggtgcttcagcagttggtcctgcagcaggggcactgctcaccctggcctccctcactgagtgcccatcttctattctgcctccagatcatcgatcccaagatgccccgggagggcctcctgcacaatggcgttcccatccctgtccccccgctggacgtgctgaagctgggagagcagaaacaggcagaggctggagagaagctcttccttgtcctcttctttgacaacaagcgcacctggttagtgggtgctgctgtgagggggctgaggggcacgccaggggtctgtgccagtggtgctgtgctagtgaggtgtacagaggggccatggatgttaccagttaccctggtctccacttgccagcaacaggcctgcacttggcatgttaatagtaactgaggggtgttgcagatcagattccctgggaaacactctgaggtcgagacttgcatcaggaggctattgaggagagctgtggggcgggagcgatgcagcactgggcagaagttgaactacagcccacttgctgcctcagctcatccactgggcacatctggagctgggtggctcaacaagataagagatgtcaggaattgggcctgtgcctttttgccctgtgccaactagttattcaatgccactgccctgagggaggggtgtggcctgggcctgaggcttccatggtggagagtgattcctagagagggactcagatgagagcctgtgagcttccagcacttccagtagcttctgggaagcatgtttccgtcctgaggggggttctggccagtgcagtgtccgctacaggagacttgctcatttatggtttacaacacttaaggtttctcttagcaccaacaagagagtgctttcaccttagcttctatagagtgaggagggagaactagctaataaaaacagtgataatagtagctgccattgagtgcttactccatgtccttatgcagattgctttatatatctgatctcttttaatcctcatttaagtcttcattaatcccctcataatccattttgcagatgaggaagttgaggctcagaaagtccagaccctgtagccagaactaagatacaaaacaagatcttgctccaaaggctgtatccttagccacatgttatattcacccggggagctttaaaaacacatacacagtgtgcaggtcccaccacagatgagtttatcagttcctggcatcagctctacttcctagccatcgccccctaattctccaacgcaaggcgaggctcagagccctccagggtggctcagctggccccagagggcagcaggtgggcctttcttagcctatggacccttacaactctccaaacagagtaagggcccagagaaggacctagctgcaaaattgattccatgccattcccccacccgactcctgcatatcctgcttgctgtcctcacctgctaggttcttggtggcctcctgcatggagtcccccaatttgcttccctctgccctgtaccctctccctggctttgctggtcctggccaagtggggccacaggagcccgagccccctgtgagacccactactgcccagcctcttactgtgcttgcatttcaggcagtggcttccaagggacaaagtcctgcccttgggtgtggaagacaccgtggacaagctcaagatgctggaaggccgcaagaccagcatccgcaagtcagtgcaggtggcctatgaccgtgcgatgatccacctgagcagagtccgggggccccactccttcgtcacttccagctacctgtaagggcagggctgggcctgcatccgcttgccctgcctccatcccgcagggcacagagaagcctcttctgcccctgccagatgtatggccggcagcttccccctctcatggtaggccagggactgggctttctccccactaagggcaaggccccagttttgaccaatcgcatggttctcctggcaggcctgctctgtgccaaaaactcccacccaaggtccctcaggggatatttcactgaagaaccagttagaagtagaaacagctgtggggcttgggcccagcttaggagattgcccagatggcaagaggtcctgggctccttcttgaggggctgcctggcccgctccatcctactcccactaactacacctcagggcgggtgaggttccgacactgatcccagagatgccgtggatacgccagggtcccagggggaatctccccaagctcacactctctcccgcttatcgcctattctcacacctcttctcggtcccatcttctgcacccattgcccagtcttgctttctctttcccatattccttttctttttctcttgtgccaaactgacagaaaccgtcaccacactggtctttttctttaatgtctcattccccttgaggccagctgctatgccaggtggtgtctctgccaggctcctcaggcccagacagaggccagcccacaacctatgaccccctcccccaggacaccacctcccacccacagaccttccctttagctgttgacacaacttcccagctctgcaagtgtgccccctggatcaaggcgggtcccctcttgtttttttctttgctgccacgaggtggtccaagccttcagggtgggctcctatcaggctgggtgtgcgagtgtccatctgtccacatggatgtcgagggtggtttgtgtggagctgtgctcgtcagctgggtctgccctcttcccccttttctccttcttctctcctcatggactttttctgcaattgcagtcttaagcttcactctccaccacctggatggcatggcgcctgccaccaaacatcttcctggcctgcgctctgccctgccctgcctagcctctgctactcccacttcccaactccagggaatgcattacttttatttcaaaccctctgcctccttccttctttctcttcaaccccctccccaccttcaccttctcaaaaatggaaggaaaaaaaaactgtgaatggggaatgctgactgacaaaccaacacaactttcagaggcttcagtgtctgttctctggacatttcttttcacctcctgagcaccaaagtcgcagggccagttgcaggccgctgattgccatgttgatttttaacctgatattctttttaattgttttaaatttttcataggggagttttggacaaaacagtcactggggagatcactgccatttttacacacttgactttttaaaaatacaaccaaccaaccaccacaacttcttatacatttgggacatgagccagagtttaaaagggaaccaacaaaacactataacttaaaaggatggggttttggattttgtataataataaaaacaatacagcatatggctagggaaggacatggtgtatataattgtaaaatactgttctaaattattcaggcctatagtttccattactggagtcctccattgtgtggccacacagtgtcgttgatttaaaggagccagtgcttcccctctccccaggtagttggtcagctgtggactctgtgacctttgtctaaacctgtgttgtaagatcttgggacttcctctctttctatgtctatctcttccccccaacactttctcttcttagtctctctctttatttttcaatctctgaatattttagtctctctctgagtctcattttttaaaatgctcttttagaacgggaaacggctcagatcctgctgtggcacggggcctatgtgtctctgtcgcgtctgctgtgaagcacatgatgctctatttattgtagagagtgactttatttgctttctagaattgtttataacagatggtataagagaggtaataaacagagaaaaatctatgcttgtaaagaatacaaaagttaattttacctactataatatgactgtctgaaacttattttctctctgagaaataaatgttctaatgggcagtagttgctgtgttgtgtttaatcagtaggggcctacccctgtcttcccattccctacagcctcctcctcaacaggccaggaccattaagaaagtttcctagctagcgagggctgtatctttctttttttttttttcttttgagacagcgtctctgttgcccaggctggagtgtagtggcatgatcatagctcactgcagcctcgatttcctgggctcaagagatcctcctacctcatcctccccagtagctgggactacaggcacgtgccaccatggccagctgtttttttgttgttgttgcccaggctggcctcaaactcctggactcaagcaatcctcccgccttggcctcccaaagtgctaggattacaagtgggagccaccatgcccagcttctgtctatctcttggacccctaggagcagtgtgaggatgttctctgactttgcttccctcccggacagcgctggcaccttctgggagctgttggaaggtccatcctaccttcccatgcctcgccttccctgtggccatgttcctttaggagcctctgctcctcattcagaaggagagtgaccctttggacacacctgacttaccaagcttgctgaacttgagactcaaggatgctcacacctcttatgtcactgctgctgttttaattctgtagatgggtagctgggacacacacaggggaatataggcctcactcctcttaaagctggaaggcatccttaagcctacctggtcttcattttacagacaaggaaacagaccagcaaaattaaaagaccaaggtcagccaactaagaaactgtggcataattctgagacaaggatctggccaaggctttgtttatgggctccacagcatttcaagactccactggcctattctgtatcgtgttcctctctcagtggctgtggctctggcatttctggataggaatgtcctgaagagcagaagcagaggggagttcccagagacaaactgcttggttgctgggcatagaatagcttttcccctgtccctactcctatcccattctggtcctacctggctcctatgcttgtctcggtgtggctgaggactcgggtctcttgatcacttcctccacggggcctttgacagccttgtcattgaagtcaaaaaagtgtcaaagttctcattttggcctaacactgacaaagtactgccaatgtgctgataatccttgtattacgtgttggggctgcaaagacacacacccctggtctcaagacactcacaacctgatttataagatacatctcacataacgccgcataaggccagtgtgagggtcccagatatgtggaggcgtttgggagagacatgtttggttggggagtaatgaaagccttcagaagcagcaattaattcaagccttgacaaatggggttaggaaagactttatttatgaattgtaagttgaattacaaagacgtttgcaaaatatttacaaaatatttagggtgaaattacaagctcattctataaaccattttagaaataaaagtggccagatgggtaggattttagcaggcgaggctaagaagaggagacaaagtcatggctcagaaagagattgtgcatattccagctccagtgactagctgacctcccacgtgactggaacccaccgaggtggcgagcagtatatcgggcttaaaagccctgtcactgtcactcactctgtgaccctgggcctctctgagactgacgtaataaaggatcccaaagacagggcaaggtgggtgccattcatatatggcaggtagcagcatccattgaaagatttgaacagggcagagacttgattggagcttggcaactaactaaacatcaaagttaaaaagcaagagtgttaagacaggatgctgggtggctgctggagggatcgctgtgggttttgaagggaggagaaagtgtaggttttttgatgagtttgtgttgtctatgggacatctaagaaatacctccagcaaacagatgggagttgagcccagaattcaggagaaagatgggagcagatgacagagatgtgggcacagtggagcccacctaggcagttagaagaatggccaaggacagcaaggaaggcgaaggacagacatgaggaaagccccttacacttagagtctggggttgggggaaagggggagacagcaccttttgaggggtctgttctccagggagggcctcacagggaatgtcaagccctcatgccacagatggaggagaaaggcaggtcagatgtgcttagcatcacaaggcaggaaaaggcagggctggaccagaactcagcacccactcagccctttctgctctccacggacttatatattacccaaagtaggcaaaagtgtccttaataaattttatcaatgatgtgactgaaattcatgaactcaagtctaaaatgatactgtaatattgggacatgtgttggagacactctgactctcggaatagagaatcccattctcctaacaagttaaaaaatatcattgaaagcatttgccaaaatcccttgtcagcttggctgcttccattaatatattagatgccattagcacctgagtgtgaatgtgccagtgcgtcagatgggctctcctgacctggctaggctctgagtttcacttttagagaagaggtggggctagtggcaagactgccaggctcggagtagtgctgaaggagagagggagggtgtgggccttgactaccctgagtctgcaggcctcccacagtgtctgcagtcgggcaatgagtgtgcaggtctctggtcctgctggctgcagccttctggcctctactgaagctgggatgagggaaggaggtctttggaggagggaagtggtttctccaaaaggtggggcagaagtttcttactctgtgatgaggaagaagggccagggagatacgtgctgggctagagctggagaggagtgctggatccaccctggtgatacgagagaagggcagggaagtgctgggtagagaagaatggggtccctggtgagggcttcaccctcaggcctggtccacggacctaggtgaggacaggcacccttgtttttgagcccaaatgttgcattttccaagaccactctggcccgccacgcccctgatcctgggcccgtaaaaaccccgagaccctagcgggcacacacacacagccggctggaagtccagagaagcagaacacaccgaaaggcaccaacagatgccgacaggctatcgacgacgccacgatgacgtgaaatttggcacagcgcggtcggagtccagctgccgggcagcccaattccaggtgaagaccaccttcccactccatcctccttctggcctccccattcacctcactgagagctacctccactcaataaaaccttgcacccatcctccaagcccacatgtgatcctatttttctggtacaccaaggcaagaacccaggatacagaaagccctctgtccttgtgataaggcagagggcctaattaagctgattaacacaagctgtctgcggatggctaaactagaagagcataatgtaacacacacccactggggcttggggagctgtaaacactcaaaccttagacgctgcagtggggtcggagcccacactccccatgacctgcctgtctgcatgctcccgctaggggtttgagctatggggtaccaaagaagtgagccacacccccattgcatgcccagcgagggggataagagaacttttcccatttcactggcacctggggtgaccttctgtctgccctttcccttcgagggtggcagaaggtaattggggatagacgaaaaacgtccgtgtgtgtgtgtgtgtgtgtgtgtgtacatatacataagtattctcttcaactttaatagggccaggactcacgggctacatgcagtcaaacactctactactgagctctacccccatcacaggctacatagagtcaaaaaagctagttgtccccaaatttcagaagggccgtggtgctgtttctgagaacattttatgtcctttgcttgacacctgtaaggctggttggaagagggtggattcagttgaactcctgaagccgtgtctcaatcccttcctcttcctttctgcctagtattcgtccgtttgggggatagagaagccatactggggatgcgacgttgatggttcctcatgggcagggagtatcacataagggtccaggggtgggctccttcccttcagcttcacagtccagagtgacgcctgaaggagattttatctaagctggtcaggaaagattataaaatccgtgggggttttttgtatgtaatatgggaaaatttttaagtgcaaagaaattaagaactaccctttttctgaccacacagaaactaccattttaatgtaattccttatagtctcttgttttttctaggtagagcatgtattttagtttcttgtactaggtagttgagtagtctgttacctctctgacatcactgcggaaattcatggtacgactgggatgcaagtcctccccacgcctcctcagcctaagtctggctttttctcacttgctgttgttcatggactggcctaaaccaagcattgcctgttagttcctctgttttgttaaaatactgatagtctccatagcatttgaaattagatgggagctatatatcttcctcccaacaactttgctctcttgggtaaatttccatggaattcagtcctagaccaaattctgccccatgtacaaacatctaatgagtgaggaagccaccatatggccatataattctcctcttgattgagaagttcccacctctgcttttgggtacagccaccagcatcgggaacgaagatcactccacagcagatacaacatgcttccgaggtcaggaccagttagtggagtagtcaggtcaggagcaggaggaacagaccccgaagtttgagtattttcatattttagatatagttttacatacagtaactctgggacacaaatcttaagattaatctctatgagtgtttatatgtgtacccacccatgaaattgtgatccaaatcaaaatacagaatgtttccagtgccctagaaggttcctcatgaccctgtccagtcaggacccctgctgcaagtgtaactaccatccagacttccattgctgtgggttagtgttgcttgttcttggacttcacataaatggaatgacacagcttgcgctcttttgtgtctggcttctttcatttaacattgtggctctgagctccaccctgttttgcatgtagctatagtttgctttttgttgttgctgagtaatattccatcatccaaacacaccacagtttgggtatccattctcctgctgatgggcactgggttatttctagtttagggctgttataaataacactgctgtgaacattcttgtacatgtcatttgatggacataagtgcttgtatgtcccaggagtggaattgctaggtcacggggcagatatatgtttagctttagtggattctgccagtttcccatttggtgttcaatttatatcccctcctgtatgagtctgatcttgcacagctccccacctgtattagtctgatctcgcacagctataaagaaatacctgagacttggtaatttataaagaaaagaggtttaattggctcacggttctgcagactgtataggaagcatggctggggaggcctcaggaaacatagaatcatggcggaaggggaaggcgaagcaggcacatcttacatggccaaagcaggaggaagggagcaaagtgggaggtgctacacactttaaaataaccagatctgagaactcactatcgtgagaacagtaagggggaaatctgcccccatgatccagtcacctcccacccggcccctcctctaacactgggaattaaaattcaatatgagatttgggtggggacacatatccaagccgtatcagagtatagttgcttcacatctgtgccaacacacagtactgctggtccatgatgtttgctccagacctgcttgttgaatgacttccattaagctccactgtgcagccaggcttctgttatcctttacagcactttctggctttagagggagaattatgaactgccaaggtgcttttcaactggggaaccctgattgagaggatggtgaggggggagagctccctggagtggatttgctgctgatcctgtcctggactccagggcatgtatgcacctggctgtgcagcccaggcctctcttggcacccacttctgtactatggtgccacccagatccctgcatgggctgtttgggagatagggtcacactgggcagtcctttttagttcagagtaacactacctttcccacctcatcctcctcatcactgtcattgggctctgagggacccacttttgctcgaggattgcttttttactttctgtttttgttttcttgagatagggtctcactctgttgcccaggctggagtgcagtggctcgatcacagctcactgcaatctctgcctcctggggctcaagcgattctcccccctcagcctcccaaatagctgggaccataggtgtgtgcaccaccatgcccgactagactaattttggtattttttgtagagatggggtttcgccatgttgctcaggctggtcacaaactcctgggctcaagggatccgctggccttggcttcccaaagtgctgggattataggcgtgagccactgtgcccggtctgagggacccacttttgaatacagaccccagcctgtgtcctgaggtgttatggttaccggtggggcagaagggacccctgcatattgcacccattttgtccttgtccactggctgttgcccaaaattctacccttagtgctttatgcttttacctctcaagggcatgatacttagggacttggcagtgaccctggttagagtgggcctgttttcctttaaatgaccggtatcccagtgtgaacaaaggatatgtgagcaggttttgataaggcaatacagcaaggacactgagtccttgaggggaaggtttaaaaggagatgaaaagggcctacttgctgttggctgaccttggtgccacagacgcacatttcagagtcatcaaggatgaaggctcagaagactctgaagcaacttcaaaggaatcgcttggatcacaggtggggtgaaggttggagataagaaggcagggccagggaaagagacccaagggagcctcgtttggaagcaaagctctggaaacaaaagactgcagagccagggtcaacctgggcaactgtttgaagccagccccgtcctcaggtgcaagaaagagcattctctgggtctaagcctgagttgtgcgcggaggacacaggctttcctgggcaggactgcaggcttctggctccactcgtgcctgtggcacacacaggttttgatagccagagcctggccagtcctcctctttctgctccctgtccctcctgggaccaggacttggcctctcccctccaccctcccttctcttcctccttcccttctttgtctccttctccttaaattttgtgatttttaatttcaattgatttattgcccctccttgtccccagcctcccagttctcctccccagaggaaaccagtttcaccagttgcatgtgtaagtttccagagacactttaatctatgcacatgagtgatgtgtgtgtccactttttctatacaaatggtagcatactttttatagtgttctaggcctcatttaaaattttaaaattaaatattgagtagatacaaaaatagtagttatagaatatatatacattttaaagacacccacaatacaatagaccagtatgggtacccacgccctgttttagacaaagaagctgggcttttgaaaccatgtgcctctctccagccccaccctcctcttcccctaaatactatcatgaattttacgcttatcctgccctttttgtctttttataatcctactacttgtttataatagattatgataaatatactatatttttatactaagataaatgtaataaacattatatataacaagacataaatatatataataattgaatatggtatactacctttttgggattatgaatagaatagttttctatggctggcttttgtcccacccataattatagttctgaagttcagtgtactgatacgcatgtccggagttagttcattttcactcttgtatagaattccattgcatggagatagtatgattattttcattggactattttatttattaataataattattattgttttctaatttaattttattttttgagacagggtctcattctgttgcccaggctggagtgcagtggtgcaatcatggctcactgcagcctcaacctccagggctcaagaaacgatcctcctacctcagcctcccaattagctgggactacaagcatgagccatcacacctggctaatttttaaaacttcttttatagagacaaggtctcactatgttgcccaggctggtcttgaactctcaacctcaataatcctccggcctcaggctcccaaagggtggctcatgcctgctgggattacaggcatgagccactgtgcttggcctcagtgctggcctcagttttggggttctaggaacagagctggtgcaaatgttcttaattgtttcttttggtgtgtgttggggggaatggcgggggttgggtaagaacttctccagggcatttgcaaggccattgggaaagtacattgtcaacttcagtagataatgccaaaattttaaaaagtggttataaccattcgcacacccactagtagtttgagcattcccctcactccacttcttcaccaacacctgcaattatcagcttttttttttttgtagatggatctgtgtgaaattgtaactcactgtggttttagttttcatttccctggttatgcatgctgccttttttttacttaaaatatgtcttggtgactgttccgtatcagagcagtgaggacttcctcctcctttcttggctggaaagtgttccatcgtcatatggaaatcttgtggtcgatttaacccgttccctattgatagacgctgtgtgggctccagccttttgcagtcgactctgcgatgcataacttcgtgtatagatagcagtctgcagctgcacgtgggggtgtgtgcatgtaggtttttcacaggaacctcctgaaatgcttagaagaaaaggaaagatagtgtttgctcccccggccctgtgcctccctattttcaacaaattcccttaattccatgagtgccccagggtcagaatggtatccaccctgtcctgtttgcaccgtaccatctcttctctcagatgatgatgttcatctcccacccgcttcccttcgagccacccccacctcatagactcctcaggaattgtctctacccggcatctctcactttttctttcttttttcttcctttctctctttctctttcttccttccttcctttccttccttccttcatttccttcccttccttccttccctttctttctgtttctctctctctctccccctcccttcctcccttccttttctttccttctttctttctttcctttttttttttttttttttgatcagggttcttgctctgtcacccaggctggagggcagtggtgcgatcatggctcactgtagcctcaaactcctggactcaagcgatcctcttgcctcagcctgccaaatagctaggactgcagctgctcgccgccatacccagctatattttttgtagagacagggtctcgctatgttgccttggctggtctcaaactcctaggctcaagaaatcctcccccctcagcttcccaagtcactgccagacatctttcttattgacatccccatctcgagaatccaagttagtattaactgaggga

SEQ ID NO: 192 - DNA, 5994 bp, Homo sapiens
attccccctcctcccccgggagcggcggcggcggccgggccggggccccagcgcgggccgggagggggcacggcggaggccacggaggcaggcgcgggagaagaccgcgctccgcttcccgggccgcgccgacctgctcggcggcctgcccgcccgcgcccaggggccccgaacggtggggccgggcaggcggctgagatgaggaagcctcgtcggaagtcccggcagaatgccgagggccggcgttccccgtccccctacagtctcaagtgctcacccacccgggagaccctgacatatgcccaggcccagcggattgtcgaggtagacattgatggacgcctgcatcgtatcagcatctatgacccactcaaaatcattactgaagatgagctaactgcccaggatatcaccgaatgcaatagtaacaaggaaaacagtgaacagcctcagttccctggcaagtccaagaaaccctcatccaagggcaaaaagaaggaatcctgctccaagcatgcatctggtacttccttccacctcccacagcccagcttccgtatggtggactcaggcatccagccagaagcacccccgctgcctgctgcctactaccgctacattgagaagccacctgaagacctggatgcagaggtagagtatgacatggatgaggaggaccttgcctggctggacatggtgaatgaaaaacggcgagtagatgggcacagtttggtgtctgcagatacctttgagctgctggtagaccggcttgagaaagagtcatacttggagagtcgcagcagtggggcccaacagtcactcatcgatgaagacgctttctgctgtgtgtgcctggatgatgaatgtcacaatagcaatgttattctcttctgtgacatctgcaacctggctgtacaccaggagtgctatggcgtcccatacatccctgagggccagtggctatgccgctgctgcctgcagtctccctcccggcctgtggattgcatcctttgccccaataagggtggcgccttcaaacagaccagtgatgggcactgggcccatgtggtgtgtgccatctggatccctgaagtctgctttgctaacaccgtgttcttggaacctattgagggcattgacaatatcccgcctgcccgctggaaactaacctgctatatctgcaagcagaaagggctaggtgcagccatccagtgccataaggtgaactgctacacagcattccatgtgacatgtgcacagcgggctgggctcttcatgaagattgagcccatgcgcgaaaccagcctcaatggcaccatctttacagtgcgcaagactgcctactgtgaggcccactcgccaccaggtgcggccactgctaggaggaagggcgactcccctagaagcatcagtgagactggcgatgaggaagggctgaaggagggtgatggagaggaggaagaagaggaagaggtggaggaagaagagcaggaagctcaaggcggggtgagtggctccctcaagggagtgcccaagaaaagcaagatgagtttgaagcagaagatcaagaaggagccagaggaagcaggccaagacacaccctccactctccccatgcttgctgtcccacagataccctcttacaggttgaacaagatctgtagtggtctctcctttcagaggaaaaaccagtttatgcagcggcttcacaattattggctgttgaagcggcaggcacggaatggtgtccctcttatccggcgcttgcactcccatctgcagtcccaaagaaacgctgagcagcgagagcaggatgagaagacaagtgcagtgaaggaggagctgaagtattggcagaagctccggcatgacttggagcgggcgcggctgctgattgagctgattcggaagagagagaagctcaaacgagagcaggtcaaagtccagcaggctgccatggagctggagctgatgccattcaatgttctgttgaggacaacactggacctgctgcaggagaaggatcctgcacacatcttcgcagaaccagtcaacttgagtgaggcaaattacctggaattcatatccaagccaatggatttttctactatgaggcggaagctggagtcccacctgtaccgcaccttggaggagtttgaggaggactttaaccttatagttaccaactgcatgaagtataatgctaaagacacaattttccaccgagcagctgtccgcctgcgggacctgggaggggccatcctacggcacgcccggcggcaggcagagaacatcggctatgaccccgagaggggcactcacctgcccgagtcacccaaattggaagacttttaccgcttctcctgggaagacgtggacaacatcctcatcccagagaaccgggcccatttgtccccagaggtgcagctgaaggagctgctggagaaactggacctggtgagcgccatgcggtccagtggggcccgcacccgtcgtgtccgcctgctacgccgggagatcaatgcccttcggcagaagctggcacagccaccaccaccacagccaccatcactcaacaagacagtatccaatggggagctgccagcagggccccagggggatgcagctgtgctggagcaggccttgcaggaggagccagaagacgatggggacagagatgactccaaactgcctcctccgccaaccctggagcccactgggcctgcaccttccttgtctgagcaagaatcccccccggagccccctactctgaaacccattaatgatagcaaacctccaagcaggttcctaaagcccagaaaggtggaagaagatgagctcttggaaaaatcaccactgcagctagggaatgagcctttgcaacgcttgctcagtgacaatggcatcaacagactatccctcatggcccctgacaccccggccggtaccccacttagtggtgtgggtcgccgcacatcagtcctcttcaagaaggccaagaatggggttaagctacagagaagcccagacagggtcctggagaatggcgaggaccatggtgtggcaggctctcctgcctctccagccagcatcgaggaagagcgccactcccggaagcggccaaggagcaggagctgtagtgagagcgaaggggagaggtccccccagcaggaggaagagacaggcatgaccaacggctttggaaaacacaccgaaagcgggtctgactctgaatgtagtttgggtctcagtggtggactggcatttgaagcttgcagtggtctgacgccccccaaacgcagccgtgggaagccagccctgtctcgagtgcccttcctggaaggtgtgaacggagactctgactacaatggctcaggcagaagcctcctgctgccctttgaagaccgcggagacctggagcccttggagctggtgtgggccaagtgccgaggctacccctcctaccctgccttgatcatcgatcccaagatgccccgggagggcctcctgcacaatggcgttcccatccctgtccccccgctggacgtgctgaagctgggagagcagaaacaggcagaggctggagagaagctcttccttgtcctcttctttgacaacaagcgcacctggcagtggcttccaagggacaaagtcctgcccttgggtgtggaagacaccgtggacaagctcaagatgctggaaggccgcaagaccagcatccgcaagtcagtgcaggtggcctatgaccgtgcgatgatccacctgagcagagtccgggggccccactccttcgtcacttccagctacctgtaagggcagggctgggcctgcatccgcttgccctgcctccatcccgcagggcacagagaagcctcttctgcccctgccagatgtatggccggcagcttccccctctcatggtaggccagggactgggctttctccccactaagggcaaggccccagttttgaccaatcgcatggttctcctggcaggcctgctctgtgccaaaaactcccacccaaggtccctcaggggatatttcactgaagaaccagttagaagtagaaacagctgtggggcttgggcccagcttaggagattgcccagatggcaagaggtcctgggctccttcttgaggggctgcctggcccgctccatcctactcccactaactacacctcagggcgggtgaggttccgacactgatcccagagatgccgtggatacgccagggtcccagggggaatctccccaagctcacactctctcccgcttatcgcctattctcacacctcttctcggtcccatcttctgcacccattgcccagtcttgctttctctttcccatattccttttctttttctcttgtgccaaactgacagaaaccgtcaccacactggtctttttctttaatgtctcattccccttgaggccagctgctatgccaggtggtgtctctgccaggctcctcaggcccagacagaggccagcccacaacctatgaccccctcccccaggacaccacctcccacccacagaccttccctttagctgttgacacaacttcccagctctgcaagtgtgccccctggatcaaggcgggtcccctcttgtttttttctttgctgccacgaggtggtccaagccttcagggtgggctcctatcaggctgggtgtgcgagtgtccatctgtccacatggatgtcgagggtggtttgtgtggagctgtgctcgtcagctgggtctgccctcttcccccttttctccttcttctctcctcatggactttttctgcaattgcagtcttaagcttcactctccaccacctggatggcatggcgcctgccaccaaacatcttcctggcctgcgctctgccctgccctgcctagcctctgctactcccacttcccaactccagggaatgcattacttttatttcaaaccctctgcctccttccttctttctcttcaaccccctccccaccttcaccttctcaaaaatggaaggaaaaaaaaactgtgaatggggaatgctgactgacaaaccaacacaactttcagaggcttcagtgtctgttctctggacatttcttttcacctcctgagcaccaaagtcgcagggccagttgcaggccgctgattgccatgttgatttttaacctgatattctttttaattgttttaaatttttcataggggagttttggacaaaacagtcactggggagatcactgccatttttacacacttgactttttaaaaatacaaccaaccaaccaccacaacttcttatacatttgggacatgagccagagtttaaaagggaaccaacaaaacactataacttaaaaggatggggttttggattttgtataataataaaaacaatacagcatatggctagggaaggacatggtgtatataattgtaaaatactgttctaaattattcaggcctatagtttccattactggagtcctccattgtgtggccacacagtgtcgttgatttaaaggagccagtgcttcccctctccccaggtagttggtcagctgtggactctgtgacctttgtctaaacctgtgttgtaagatcttgggacttcctctctttctatgtctatctcttccccccaacactttctcttcttagtctctctctttatttttcaatctctgaatattttagtctctctctgagtctcattttttaaaatgctcttttagaacgggaaacggctcagatcctgctgtggcacggggcctatgtgtctctgtcgcgtctgctgtgaagcacatgatgctctatttattgtagagagtgactttatttgctttctagaattgtttataacagatggtataagagaggtaataaacagagaaaaatctatgcttgtaaagaatacaaaagttaattttacctactataatatgactgtctgaaacttattttctctctgagaaataaatgttctaatgggcagta

SEQ ID NO: 193 - protein, 1202 aa, Homo sapiens
MRKPRRKSRQNAEGRRSPSPYSLKCSPTRETLTYAQAQRIVEVDIDGRLHRISIYDPLKIITEDELTAQDITECNSNKENSEQPQFPGKSKKPSSKGKKKESCSKHASGTSFHLPQPSFRMVDSGIQPEAPPLPAAYYRYIEKPPEDLDAEVEYDMDEEDLAWLDMVNEKRRVDGHSLVSADTFELLVDRLEKESYLESRSSGAQQSLIDEDAFCCVCLDDECHNSNVILFCDICNLAVHQECYGVPYIPEGQWLCRCCLQSPSRPVDCILCPNKGGAFKQTSDGHWAHVVCAIWIPEVCFANTVFLEPIEGIDNIPPARWKLTCYICKQKGLGAAIQCHKVNCYTAFHVTCAQRAGLFMKIEPMRETSLNGTIFTVRKTAYCEAHSPPGAATARRKGDSPRSISETGDEEGLKEGDGEEEEEEEVEEEEQEAQGGVSGSLKGVPKKSKMSLKQKIKKEPEEAGQDTPSTLPMLAVPQIPSYRLNKICSGLSFQRKNQFMQRLHNYWLLKRQARNGVPLIRRLHSHLQSQRNAEQREQDEKTSAVKEELKYWQKLRHDLERARLLIELIRKREKLKREQVKVQQAAMELELMPFNVLLRTTLDLLQEKDPAHIFAEPVNLSEANYLEFISKPMDFSTMRRKLESHLYRTLEEFEEDFNLIVTNCMKYNAKDTIFHRAAVRLRDLGGAILRHARRQAENIGYDPERGTHLPESPKLEDFYRFSWEDVDNILIPENRAHLSPEVQLKELLEKLDLVSAMRSSGARTRRVRLLRREINALRQKLAQPPPPQPPSLNKTVSNGELPAGPQGDAAVLEQALQEEPEDDGDRDDSKLPPPPTLEPTGPAPSLSEQESPPEPPTLKPINDSKPPSRFLKPRKVEEDELLEKSPLQLGNEPLQRLLSDNGINRLSLMAPDTPAGTPLSGVGRRTSVLFKKAKNGVKLQRSPDRVLENGEDHGVAGSPDASIEEERHSRKRPRSRSCSESEGERSPQQEEETGMTNGFGKHTESGSDSECSLGLSGGLAFEACSGLTPPKRSRGKPALSRVPFLEGVNGDSDYNGSGRSLLLPFEDRGDLEPLELVWAKCRGYPSYPALIIDPKMPREGLLHNGVPIPVPPLDVLKLGEQKQAEAGEKLFLVLFFDNKRTWQWLPRDKVLPLGVEDTVDKLKMLEGRKTSIRKSVQVAYDRAMIHLSRVRGPHSFVTSSYL

SEQ ID NO: 194 - DNA, 4782 bp, Homo sapiens
ctgtcccctcagttcccaggtgccatgaggaagcctcgtcggaagtcccggcagaatgccgagggccggcgttccccgtccccctacagtctcaagtgctcacccacccgggagaccctgacatatgcccaggcccagcggattgtcgaggtagacattgatggacgcctgcatcgtatcagcatctatgacccactcaaaatcattactgaagatgagctaactgcccaggatatcaccgaatgcaatagtaacaaggaaaacagtgaacagcctcagttccctggcaagtccaagaaaccctcatccaagggcaaaaagaaggaatcctgctccaagcatgcatctggtacttccttccacctcccacagcccagcttccgtatggtggactcaggcatccagccagaagcacccccgctgcctgctgcctactaccgctacattgagaagccacctgaagacctggatgcagaggtagagtatgacatggatgaggaggaccttgcctggctggacatggtgaatgaaaaacggcgagtagatgggcacagtttggtgtctgcagatacctttgagctgctggtagaccggcttgagaaagagtcatacttggagagtcgcagcagtggggcccaacagtcactcatcgatgaagacgctttctgctgtgtgtgcctggatgatgaatgtcacaatagcaatgttattctcttctgtgacatctgcaacctggctgtacaccaggagtgctatggcgtcccatacatccctgagggccagtggctatgccgctgctgcctgcagtctccctcccggcctgtggattgcatcctttgccccaataagggtggcgccttcaaacagaccagtgatgggcactgggcccatgtggtgtgtgccatctggatccctgaagtctgctttgctaacaccgtgttcttggaacctattgagggcattgacaatatcccgcctgcccgctggaaactaacctgctatatctgcaagcagaaagggctaggtgcagccatccagtgccataaggtgaactgctacacagcattccatgtgacatgtgcacagcgggctgggctcttcatgaagattgagcccatgcgcgaaaccagcctcaatggcaccatctttacagtgcgcaagactgcctactgtgaggcccactcgccaccattgaacaagatctgtagtggtctctcctttcagaggaaaaaccagtttatgcagcggcttcacaattattggctgttgaagcggcaggcacggaatggtgtccctcttatccggcgcttgcactcccatctgcagtcccaaagaaacgctgagcagcgagagcaggatgagaagacaagtgcagtgaaggaggagctgaagtattggcagaagctccggcatgacttggagcgggcgcggctgctgattgagctgattcggaagagagagaagctcaaacgagagcaggtcaaagtccagcaggctgccatggagctggagctgatgccattcaatgttctgttgaggacaacactggacctgctgcaggagaaggatcctgcacacatcttcgcagaaccagtcaacttgaattacctggaattcatatccaagccaatggatttttctactatgaggcggaagctggagtcccacctgtaccgcaccttggaggagtttgaggaggactttaaccttatagttaccaactgcatgaagtataatgctaaagacacaattttccaccgagcagctgtccgcctgcgggacctgggaggggccatcctacggcacgcccggcggcaggcagagaacatcggctatgaccccgagaggggcactcacctgcccgatggacaacatcctcatcccagagaaccgggcccatttgtccccagaggtgcagctgaaggagctgctggagaaactggacctggtgagcgccatgcggtccagtggggcccgcacccgtcgtgtccgcctgctacgccgggagatcaatgcccttcggcagaagctggcacagccaccaccaccacagccaccatcactcaacaagacagtatccaatggggagctgccagcagggccccagggggatgcagctgtgctggagcaggccttgcaggaggagccagaagacgatggggacagagaagcctcctgctgccctttgaagaccgcggagacctggagcccttggagctggtgtgggccaagtgccgaggctacccctcctaccctgccttgatcatcgatcccaagatgccccgggagggcctcctgcacaatggcgttcccatccctgtccccccgctggacgtgctgaagctgggagagcagaaacaggcagaggctggagagaagctcttccttgtcctcttctttgacaacaagcgcacctggcagtggcttccaagggacaaagtcctgcccttgggtgtggaagacaccgtggacaagctcaagatgctggaaggccgcaagaccagcatccgcaagtcagtgcaggtggcctatgaccgtgcgatgatccacctgagcagagtccgggggccccactccttcgtcacttccagctacctgtaagggcagggctgggcctgcatccgcttgccctgcctccatcccgcagggcacagagaagcctcttctgcccctgccagatgtatggccggcagcttccccctctcatggtaggccagggactgggctttctccccactaagggcaaggccccagttttgaccaatcgcatggttctcctggcaggcctgctctgtgccaaaaactcccacccaaggtccctcaggggatatttcactgaagaaccagttagaagtagaaacagctgtggggcttgggcccagcttaggagattgcccagatggcaagaggtcctgggctccttcttgaggggctgcctggcccgctccatcctactcccactaactacacctcagggcgggtgaggttccgacactgatcccagagatgccgtggatacgccagggtcccagggggaatctccccaagctcacactctctcccgcttatcgcctattctcacacctcttctcggtcccatcttctgcacccattgcccagtcttgctttctctttcccatattccttttctttttctcttgtgccaaactgacagaaaccgtcaccacactggtctttttctttaatgtctcattccccttgaggccagctgctatgccaggtggtgtctctgccaggctcctcaggcccagacagaggccagcccacaacctatgaccccctcccccaggacaccacctcccacccacagaccttccctttagctgttgacacaacttcccagctctgcaagtgtgccccctggatcaaggcgggtcccctcttgtttttttctttgctgccacgaggtggtccaagccttcagggtgggctcctatcaggctgggtgtgcgagtgtccatctgtccacatggatgtcgagggtggtttgtgtggagctgtgctcgtcagctgggtctgccctcttcccccttttctccttcttctctcctcatggactttttctgcaattgcagtcttaagcttcactctccaccacctggatggcatggcgcctgccaccaaacatcttcctggcctgcgctctgccctgccctgcctagcctctgctactcccacttcccaactccagggaatgcattacttttatttcaaaccctctgcctccttccttctttctcttcaaccccctccccaccttcaccttctcaaaaatggaaggaaaaaaaaactgtgaatggggaatgctgactgacaaaccaacacaactttcagaggcttcagtgtctgttctctggacatttcttttcacctcctgagcaccaaagtcgcagggccagttgcaggccgctgattgccatgttgatttttaacctgatattctttttaattgttttaaatttttcataggggagttttggacaaaacagtcactggggagatcactgccatttttacacacttgactttttaaaaatacaaccaaccaaccaccacaacttcttatacatttgggacatgagccagagtttaaaagggaaccaacaaaacactataacttaaaaggatggggttttggattttgtataataataaaaacaatacagcatatggctagggaaggacatggtgtatataattgtaaaatactgttctaaattattcaggcctatagtttccattactggagtcctccattgtgtggccacacagtgtcgttgatttaaaggagccagtgcttcccctctccccaggtagttggtcagctgtggactctgtgacctttgtctaaacctgtgttgtaagatcttgggacttcctctctttctatgtctatctcttccccccaacactttctcttcttagtctctctctttatttttcaatctctgaatattttagtctctctctgagtctcattttttaaaatgctcttttagaacgggaaacggctcagatcctgctgtggcacggggcctatgtgtctctgtcgcgtctgctgtgaagcacatgatgctctatttattgtagagagtgactttatttgctttctagaattgtttataacagatggtataagagaggtaataaacagagaaaaatctatgcttgtaaagaatacaaaagttaattttacctactataatatgactgtctgaaacttattttctctctgagaaataaatgttctaatgggcagta

SEQ ID NO: 195 - protein, 858 aa, Homo sapiens
MRKPRRKSRQNAEGRRSPSPYSLKCSPTRETLTYAQAQRIVEVDIDGRLHRISIYDPLKIITEDELTAQDITECNSNKENSEQPQFPGKSKKPSSKGKKKESCSKHASGTSFHLPQPSFRMVDSGIQPEAPPLPAAYYRYIEKPPEDLDAEVEYDMDEEDLAWLDMVNEKRRVDGHSLVSADTFELLVDRLEKESYLESRSSGAQQSLIDEDAFCCVCLDDECHNSNVILFCDICNLAVHQECYGVPYIPEGQWLCRCCLQSPSRPVDCILCPNKGGAFKQTSDGHWAHVVCAIWIPEVCFANTVFLEPIEGIDNIPPARWKLTCYICKQKGLGAAIQCHKVNCYTAFHVTCAQRAGLFMKIEPMRETSLNGTIFTVRKTAYCEAHSPPLNKICSGLSFQRKNQFMQRLHNYWLLKRQARNGVPLIRRLHSHLQSQRNAEQREQDEKTSAVKEELKYWQKLRHDLERARLLIELIRKREKLKREQVKVQQAAMELELMPFNVLLRTTLDLLQEKDPAHIFAEPVNLNYLEFISKPMDFSTMRRKLESHLYRTLEEFEEDFNLIVTNCMKYNAKDTIFHRAAVRLRDLGGAILRHARRQAENIGYDPERGTHLPDGQHPHPREPGPFVPRGAAEGAAGETGPGERHAVQWGPHPSCPPATPGDQCPSAEAGTATTTTATITQQDSIQWGAASRAPGGCSCAGAGLAGGARRRWGQRSLLLPFEDRGDLEPLELVWAKCRGYPSYPALIIDPKMPREGLLHNGVPIPVPPLDVLKLGEQKQAEAGEKLFLVLFFDNKRTWQWLPRDKVLPLGVEDTVDKLKMLEGRKTSIRKSVQVAYDRAMIHLSRVRGPHSFVTSSYL

SEQ ID NO: 196 - DNA, 52640 bp, Mus musculus
  misc_feature (1)...(52640): n = A,T,C or G
cccatatttgaacagagctatttatcagacctcatatttacgtttttctcagagtaatgtggaatgaagcccctgtacacacatacctcacaaagcctcacctgtgttgaagaattttatagactgactacaacttatggggtttggggtgtgtgtgtgtgtgtgtgtgtgtgtgagagagagagagagagagagagagagagagagagaaagagagagaaagtatatgtgtgcacttgcacatgttggaatgttgcagatccagaggtagatcatcttgggctatctttaatccccttcatggtcatttgtcgcccacctctgtatctgacctggcattccttcaactaacaagtaaaaccatgcatttattcagcagaccagtagctccgccaggtctaaggctaagcatggcatcagatggcacccgagacttacagaagagatagccccgctttcctgtaacccatctatctgatgtccctggcaatgtatttgaaaatgccttcatttagactgccttttgttctgcgactatcaaaagttcatgtaacgtttccacagtgaagccttgtcatcgggagtaacttgaagccatgtgactcacagccgaatcacaatgaaaccatctcttaattccctttggagcaagagacaagttttgccttgatggtagcaactttgtctatttctaacgttcaaattcaagataaataagttgacgggaaaattcttcttggatcccctgagaggaaagggagaatgagtgggacctgggttccaccacaggccaggcggagaaatagactgccgggctaacccttaggtgtgagatatgcaaaaaaaaaaacaaaaacaaaaacaaaaaaaccaaacaaacaagcaaacaaacaaaaaaaaaaaacgtgacagagagcataatggttgtggtggggttcaggtggactgagaggaagtagggggatatgactcaaaggatatagaacagatcacattaagtccgtaaaacgtgtaaaagaatctccgcagctccaggaataataaggaaacctagcaagtctacatggtcatggtagcctacaactactggtattccagtttcgggggatctgatggcctcttccggcctccgtgggcaagagacattcacatggtacacatgcacaaatgcaggtaaaatacccacacacataaatattaagtacagatgtctattaaatattatttaaaattaggcatggtggtaccctactagaatgcacagatttggaaggcaggggcagaaggatcaggagtttaaggtcacactgtactgcctaatgagttcaaagccaacctagctatatgatgaaagcctatgtcatacatatgttcataaatatattaattaattaattaatgtagtcttcatgtattttgttatttattttaattaattcatgcatggtttgtcttaatttattatttattcaattgatttatccatagtttattttattatttatttattatttaaattatatatgcataaaatttatcatatacatatataatttataatagcatcaaaaacgcaannnnnnnnnnnnnnnnnnnnttctaacgttcaaattcaagataaataagttgacgggaaaattcttcttggatccctgagaggaaagggagaatgagtgggacctgggttccaccacaggccaggcggagaaatagactgccggctaacccttaggtgtgagatatgcaaaaaaaaaaaaacaaaaacaaaaacaaaaaaaaacaaacaaacaaacaaaaaaaaaacgtgacagagagcataatggttgtggtggggttcaggtggactgagaggaagtagggggatatgactcaaaggatatagattgtagaatgggcaaattcagagtcaggtgtgagctcacagccacagcgctgcactgcatgctgggaaatgtggaaagccaattccaaagggcacatgttattcctgcagagcatggagcctggttcctagggcccatgttagaagactcacaactgcctgtagctcctgctccagggtccccaatgcctcctcctggcaccctcaaatgtgtgtgcatacaaacacacaaataaaaatttcaattaaaagtaaagaatgtgataatttaagaagtcgtgtgtgtgtgtgtgtgtgtatgcagggcagtgggtgtgggggaataaagggagtaggggaaaacccgcatctgccaaagttccagtgctctgggcagaactgccgcatgctttccacgtggccccaggtgtgtgtctggctgtgtgaagccactaaaccccagctcggtgggtggtggacaaggggcagtcctaggtaccaggttctcagccttggtcatctcatgctggacactgccgaggaagagctaagaacagaatgggggccccaggggcagctctttcagactcggggctgaagggatgagagggcaaggggagatggcggtgggtggtttccacgtgggtgagagtccttggtccagtccatggctggagcacaggaaggccttctggcgggaggttagacacggctcgttatgagaaagcttatccaagcgttcaagcacggctggtcttgatgagcagagacagtctactatggttttagagctttattgtagaaaggtaggggaaaaagagagaacgtagagagagggagaggccggccttggccatgttgctggggaggagggtgtgagaaggagggctagagatgagagtaagagtaaagagtgaggaggggccaagcagctccttttatagtgggctgggctatcaggtaactatggggaggagcatacctggctatagtcagataactgtgggggtggagtctagccagaatgccagaagcttgggacattgtctgcatgactgatagtcacacacctctctgccggaggaggggtgggggtgggaggctgtagctatgtgaagggagccaggtgcccaggatgcatggccaaactcctgccatcccatgaaggcagaaatctccacccactggggctctggggttcaaggcctgttctcgactggagactaggctgtctgtgcacagcccactgccctacaaatatgtatatatgtatatatgtatatctgtgtatatgtatatatacatatgtgtgtgcatatatatttatatacatatatgtgtatatacatatatgtgtgtatatatgtatatatacatagagagggggattaattaaataaattaaataataatattaaaatgtctctacagtagggagcggcatggagaagctatcacattcattcagtgtcttatttgggatcccacatggtacaataaactcagaaagaaagctagagagagagagaaaagaaagaagattggaaggacaaaaggataagccagataaaaagaagaaaatataaaagaaaaagtgaaagagccatggagcaacaagaacatgaagctgaatgtggcagtgcatgcctttaatcccagcacttgggaggcagaggtaggtggatttctgagttcgaggccagcctggtctacagagtgagttccagggctacacagagaaaccctgtctcgaaaaacaaaaacaaacaaacaaaagaaaaaaaaagagcagctgatcaagctaattcacaaacactgatgcagagccccttaaacatatgctattagacattgagtccagtgattggtcgtaaagtgcataagcatacgagtgtgtgctcgtgtgtatgtgtgtgtgtgtgtgtgtgtgtgtgtgtgtgtgtgtgatgactcttaattaagaattaatcttaggaaaccagattggcatagcatcaagaagcccattttgcctgcactggaatagtatggcaaattgtgatataatagaatcccatatagacctaatgtgacaacaacgacttgaaaggaagaggaaagctgctgttacctggagaacagatcacattaagtccgtaaaacgtgtaaaagaatctccgcagctccaggaataataaggaaacctagcaagtctacatggtcacggtagcctacaactactggtattccagtttcgggggatctgatggcctcttccggcctccgtgggcaagagacattcacatggtacacatgcacaaatgcaggtaaaatacccacacacataaatattaagtacagatgtctattaaatattatttaaaattaggcatggtggtaccctactagaatgcacagatttggaaggcaggggcagaaggatcaggagtttaaggtcacactgtactgcctaatgagttcaaagccaacctagctatatgatgaaagcctatgtcatacatatgttcataaatatattaattaattaattaatgtagtcttcatgtattttgttatttattttaattaattcatgcatggtttgtcttaatttattatttattcaattgatttatccatagtttattttattatttatttattatttaaattatatatgcataaaatttatcatatacatatataatttataatagcataaaaatgtaaatgaaggggccagtgggtaaagtgctggttatacaagcctggtaacctgaatttgattcctagaacctactcaaagatggcaggggagaagcaactctgcttatgtgccctctgatctccacataaggccattgcatgcacgacccataggtacacaacagaacatgcacacgcgcacacacacacaaataaaatcctttcctaattaagaaaagaaactgaaaactaccacccagtatcaggagaaattaagcagagaaatataccatattcatggaatcaaagacatactacccttaaaatgtcaattatctcccaagtgatctgcaggttccgtctcacctcacggattgtttctggcaaaagtaattaattagtatattcggttttttgttatctttagcattgcttttatttcttaagatcagttttattgaggcttaattgacaggctgtctaatgtgtccattctaaatactcggtttgtacaaaaaataaaaaataaaaaaagacacctgtgtagacaccgctcagtcaggtccctccgcccacaactccctcccaccctgcctcaggcaaccactgatcagctctttgaagctatatgtctaaatgtcatctaagtaaatccatatggaagtgtgatggagcctgggccccggtgctcagcacagggagtgcttctgttcattcgtgttgtaggaagcagggctgtggtgcttcctgtgggtgggcacaactacccggagcacacaactgctgtgtgtctgttcacaatagttggactattcagagcgtttccagtttgggatgctaatgagtaaagccaccatgggcgttcaaagatggtttttttttgtttttgtttttgtttttgtttttgtttttgttttttttgtgttgttttttttttttttttttttttttttttttgtggaggcacacattttcacttttccctggtagaatctaaaaatcagaattggttgggtcgtaaatgtatgttgacctttataagacattgcgtcagggaatttcccaaagtaattggatgagttacaatcccactaaaagcacgggtatttcaagaggtccctggccttgttgaagcctgaccttattggtccttttgacttgagctccaagtccagcaggtgctatggaactgtgctgtggtcttcttcaacatccctcagtgatggatgagactcggcatctttcatcactgcgcctgtctcttctccatgctttctggttctttcattagctgtaagaatgcatgcacacactgtacattctgggtgtcagaccgagtatgtaggcgggggacattttctcctacgctgtggcttctttttcctttcgtttcctttacaatacttttcaaagagcagatgttttacgactttgacgaagcctgatgtggaagaataaaagatcgtgggtttctcctattatgccccaagaaagttttataagtgaaaacacagcgcgtatttttcttctaggttttctttgacgggtttgatagcatcagactttacattcaagcctgtcatccattttgaattagctccacacgtgccgtgcaatttccccagtattgttactgaagcagcagcccttcctggggagttagagcgcccgattattgacagttgactgacatatatgtgagtcacctgcaccctctgaggtacatatgcggcccgctctttgattttacataaaagagctaagaacggagaacaacctcacggacacaaaatcagcacactctcacaccatagtggtttaaaagggagcacaaaaatgaacaaatcaggcaagagaactcgaaagagccagaggcaaactacatctgtccgtcacacgactgacgatccgctagcatgtgctgatctagtcaacggagaataaacaacctttagcctcacctggaaccattcccaaggtgattgtgtatctgtgatacacaactgtgacagtgtacggtaatgcaccatacactaacccacagagctcaacaggaatgacaactacatacaaacttctagaacaaactgaaggaaaccgtgttcactggcatggataaacagctgcttctcaaacaggatgcagaagatgccaaccagagcttccacagagcgataaaaaaataaaataaaacaaaataaaataaataaaaaacaaacaaacaatcaaaaaacaaaaactagcaagcctctcatcctcttcctgctggagggcagactgtcgcttctgcccacatgtacttcagcaaagaagcagatggaagaatcaggcactgtttagtaggatgttactcaggatggcaatgaactgcaagcaagcaagagcatgggtgaatcccagaaacatcatttggagccaagaatcaagacagggaacgctaaggggttaaagcagttgcctatcatggatggggctctggattcaatccctggcgccacaaaaagaaaagaaagaaaagagatgagacgagacgagacgagacgagacgagaagaagagagaagagaagagaagagaagagaagagaagagaagagaagagaagagaagagaagagnnnnnnnnnnnnnnnnnnnnnnnnnnnnnnnnnnnnnnnnnnnnnnnnnnnnnnnnnnnnnnnnnnnnnnnnnnnnnnnnnnnnnnnnnnnnnnnnnnnnnnnnnnnnnnnnnnnnnnnnnnnnnnnnnnnnnnnnnnnnnnnnnnnnnnnnnnnnnnnnnnnnnnnnnnnnnnnnnnnnnnnnnnnnnnnnnnnnnnnnnnnnnnnnnnnnnnnnnnnnnnnnnnnnnnnnnnnnnnnnnnnnnnnnnnnnnnnnnnnnnnnnnnnnnnnnnnnnnnnnnnnnnnnnnnnnnnnnnnnnnnnnnnnnnnnnnnnnnnnnnnnnnnnnnnnnnnnnnnnnnnnnnnnnnnnnnnnnnnnnnnnnnnnnnnnnnnnnnnnnnnagaatgcttctaaggatttggaaagttctggagcaggttttcctaacctgtattactgacgttggacaagaccgccctttgctgtacagacagtcctgggtcctgtggcatctgtggttgacatccgctagttgccacccctctcagagctttgacaactgcacatgtctcctgacactgccaactgtcctttacaaaggtggctgtagaacttaaatgctgtgggatttacattattgtttcattggttctggaggagagagggagtcgagtcactttacggaaatccctcatgctacatacgtagtgcttaatgtttaaagttctcacttcaaaacaacaacaacagcaggtcaattaaatcttttttttaaaaaagtttttataagcaagcagggagagtacatacagtgaataccagtgttcagtctgtagacacggaggctaaggtccaggatggcgagggtgggtgctcggcagaacccatgagagaagcctgttccagactcctgctccctccttctgctcctccctcccccacactcccaggtcctcctcccaagtgcttcccaagcacacagcagatcccagtgatgaacttcggcccagaccgcattgtggaagccggtgggtttggaagccactgctgtgggtcggcaaggagaattcaagccccgaacattgtgcaaacaggatattcacttgtgtcagagagatcaaaaaaggcttgaggtttttcttcacagcctcagcctgcctccctctcctctctcactttatctagtccttgcagtgagcaggcgcctcttgtacagcaagcaggaagacatggctgcgggggagacacagctctatgccaaggtctccaacaagctcaagggccgcagcaccccctcactcctggatcccctcctggccatgggcttccccacacataccgcgtgagtactgcaactgccacggccctggagcctgactgatagagacacgtgcacattagaagccatgtgggtctctggctgcccacttggtgggggctggggggggggcaaatgttactctcctgcagatcagtgactcttacagtggcatttcaaggtatctgattctgacatgaggctctaaggctaggatctctcgagagaattaccatttgagtttctaagcagcctggggaaagtcacttgtcttttgggaaaatatctggaatatctagtgacaaaatagaatgcatgagaaattccagagacagcttggctcagcaccaccgggctcatccaagtgccctgcgctcagagaggaaagagaagctactgaccatggttagaacatccatcgtaaacctgctgcttagcggtggtcctctcagatccctactcccacggaggcacaagtcggaggtgtacttcagggaacccgggtctcagggagtgagccaaatagcccttcaatgagataataaaaccctggctaccatggaggacatggtattgaagctagtctcttctcctccggacatcagggcttcgtggtcactaaatggggaacagaacccaccaggaagccgatggtcacatgttcaccatccagctgcagatgagaacaccaaggtctaaagagtagcttgtggcaaacctaggtaggacaggagccagttcccaaggcctccgagacccactctgttttactgcttaagccgtagggtggcctcaacttcaaaatccctgttagttaaaccgataaacacctgtgtgtcttcaggctcttcgtcagggctcagaggggctcatgtttctgacctctctgttgtagcctctccaggtggctacatccccattgtccctcgcacaaatagcagtactactgggtggcattacattggattccaatggggaccagctgtatcagccaatgatggttgggtctgtggcccattctggtcttgttgacccaactcagccaaattcaagtcaacatatttacatcccaggccccagagtgagtaagacataccggggccatgaggaaagcaccagtgagcagctggggtggggggacacaggcgagggatgtggatatgtctgcccagtggttgggtaagggatgcttcctgctgagcacctgtcagggcagtacacgctggagccaggaacgcagcctgtctcagccaggtgagcatccacagtagatggattgggttgactttgtcgcagggtagcggggtgcagagagaggaaggcaagagagcagaggtcaggttctaagcaccatgggatttagggtgtggcatgagttattatgagaaagatggagatcttggcataaaggcactcatgggaaggccagggtcttggccctgataggacacagtgtcagtgagcagccatttcactgccagtactcaacccttccaaagaagagacggctgggccttgactgtcccttgttcacgttccacaggctcaaagcactagcggccacagggaggaagacagccgaggcggcagcagactggtaagcgaaaggggagctgtagggttatggggggcttgggtgacttcaccgctgacactctctatcccaggagggtcttctgagtgggatggggtgcctgtggaagtgactcaaaatgacatccatttgcaccagttctgagcccagagaaataacgaaacccacctttaagacattacaagagaatctagagatttttttctcacttgaaaaccagatttaggactctgcacatatcctgcaaacatcctggcttctaccccttgcacataagtgcaagcaagcaagtgcatnnnnnnnnnnnnnnnnnnnncacacacctgatttaatccaaatttgactcagaaaaagattcatgtttgtgatatatgttaaataagcaggaaggtggcatttttgttgctataagatccacttactcacaggctgctgcaatggagaaaaatttaaagagagtcatgaatccccaaggtatcaaagggtacacctggagtggggttaaggaaagctgtccctccttaactcacactccagtcacctgcctggggggtgagattgtggggtgggagaggggtccttgtttttaggagctcctccccagccttggtgtcagttggcgtcatccttccacgcagctgggaagtccctcccgctcttatctgaagaagccacagtgaaagtcgaacaacagtaaaaagcagatcctgggctcggctgtggctcagcagtgtggggagctgggctctctacatgccctacaaaggcaacttaaagaaggaagggcttatctgggagtatttgatgatgcacgtcccatgccgccatcttggtgggaaagccttgtgatgtggctagtgtgtgagacagctggcctcttcatatccacagcgaggaagctgggagaaatgaatgttggtgcctgaagcacactcagaggtgcaggtccctccaaccgtcttcactcagctccctggcctccatttccctgtctgtgggatggcgccactcaatcattcattcaggttgagacttccttcctcagttgacctggcctagactttccctcatggtggagtctggcggtctgttttataagattgattctagggttccatgcccaaccctacctaaactaaacaaatctcttccagcgaatgggctggggttctgtgttctaggagaacctataagactacaggccgagggtgtcaaggcagagggctcacagctagaggctgcacaggcagaggtatggatgtacaggcagagggggcacaggcagagggggcacaggcagaggacgcacaggcagggggagcacaggcagagggggcacaggcagaggacacacagacagaggaggcacaggcagagggagcacaggcagaggacacacagacggagggaacacaggcagagggcacacaggcagagggagctcaggcagaggacacacaggcagagggggcacaggcagaggggacacaggcagaggacacacaggcagaggacacacaggcagagggcacacaggcagagggaacacaggcagaggacacacaggcagaggacacacaggcagagggagctcaggcagaggacacacaggcagaggacacacaggcatagggcacacaggcagagggaacacaggcagagggagcacaggcagaggacacacaggcagagggcacacaggcagagggagctcaggcagaggacacacaggcagaggacacacaggcagaggacacacaggcagagggcacacaggcagagggagctcaggcagaggacacacaggcagagggggcacaggcagagggggcacaggcagagggggcacaaacagaggggacacaggcagagggggcacaggcagaggacgcacaggcaaaggacacacaggcagagggcacacaggcagaggggacaccagcagaggaggcaaagacagatggagcacaggcagaaggagcacaagtagagggagcacaagtaaagggagcacaggcagagggagttccatgtctatgcagagaccttttaaaaaatcagctatccgccgagctcttgaccactgtgccggaagctctggaaacatgaaagtagtcgaaaggtgtggtggtttgaataggaatggcccccacaggctcatgtaggtgaatgtttgacctatagggcgtggcattatcaggaggtgtggccttgcaataggaagtgtgtcattgggggtgggctttgaggtctcagatgctcaccagaccagtggctcaggatctcttcctgctgccattggctccagatgtggacctttccctggtccttctcctgcaccatgtctgcctacatgccaccgcgcttcccaccatgacaataatggactaaacctctgaactgtaagccagccccagtgaaatgctttcctttgtaagagttgctgaggtcatagcgtctcttcacagcaatgcaaacaaaatgtccctggatttggaaatgagtagaggcgatgttccatatgtgtaaggtgggttgtgaggcagccttggtaatcctcactctggcaatgtacctagatatctattctccacatggaagagcccaaaatgcaggtcacggaatggcttgaactaactcatgatttatgcaaacacacatgctcgttcgatctgctgcaaatgcgccattgggatgagctcaggaaagagctatagggggagacaagagatgcaggctcagctctgccgcagagcttacatacaaggtgtatgcctggtgagagcaccccacttcctagcataatgagacatcacaagcaagtgtcggtcaccgagagttctcgaatgagtgtgcgccaagtaagctgactgctgcttagctattgccatacagagattttcccatgtgaatttttttgcctatgcttcttgctcttcttgtcttgaggtagaattattcatttaagacactgagtgctttcctctgcaagtgctggcagattgcactaagcaatggtcgcacagctacaacctgtggccttgctgtactttcgacacaatagagaacaacatcgaagctttgaaataaatgcctatcttaacttgacccataagagaaattgtgtctcttccattttcatttgttttgtgatgaactcgtatttggcgctatacgtcaatctttcttgtatttagagtggttttcttagctgggtgtggtggctcatacctgcagtcccagcagtgaggaggctgagacaaacagaatcacccccaggcccaccaggtgtataaagagatctgtctcaagaaacaaataaatgctgtttttcatcaaaataaataaatactttttgagtcaaaaaaccccactagtattcacttaaatgttgtccaatctttttttttttttttttttttggtttttcaagacagggtttctctatgtagctctggctgtcctggaactcattctgtagaccaggctggcctcgaactcagaaatccacctacctctgcctcccaagtgctgggattaaaggcgtgcaccaaaagattggctgttgtccaatcttttgtgatttaaatttttccatttaatgtgaagtcagtggtgaagttaaaatgtgaaagatcatcactcttctgaaggttgaggtctgggtccctttgtatctggacctttggctacagagccagactgtaatgggactgatatcaagtacatattggtctagcctagagccaacagccccaccactgggtgccatcttgaagggatggccacagcactgatgtttttgtgtgagatcactatagccctaactgtgggttggtgttgccgctgttgcatgtcttcaatggggacacatccgattgatatgacagggttttctgttgcaggctgcatggtcactgcaatgacccttctctggatgaccctatccctcaggagtatgctctcttcctctgccccacgggccccttgctggaaaaactccaagagttctggagagagagcagacggcagtgtgcaaagaacagagcacatgaggtcttccctcacgtgacactctgtgactttttcacggtaagtctactccagaggccttaaatgctcaccacttcagctgatggcagtgttctctggtaacttggcaacaatagaacgcaactgatttattctaatcaagacattagcatgagctatctgctttgtgggatcttttccttccccctcttcaacttcagttcatccttcaggacccaaatcattttagagtcttcagctctccaggcagaagaagataaaatcccaggctctatgcatcttattgtcaatctctctaggagcacatttgggtgatatgaaggtgatatgcccctctaggaaggcagatattacccctggtccttgtccacccagagacttgcaaagtcctaaacagagcaagaaccccctgtgtgatgaaggactaaaggatgctgatttggctggacataaaccagggtcttccctaagttagggcctagccctctgtggaaaaaaaaaatggccaagttagcagcctccctagggagcactgtcaaagaaagaggatgcacagttgttggacaaagagaagagggcctgaggccaaagggaaggacccaccgccatttcttctacacctgtacttgatgagctaaagaaggacctacctactgctgggacatcagggcagagcccgccactccacagtgctaagggaacacaaagcatgatgtgcaagaaagaagtttccagaagccttttccctgagtgcctgagactgggagctctctggggtcaaaactaaaccattgccttctggaggtctgagatgggattccctcagggggcactgtgagcttcctaggagttgactagagaattccagaagctaacatatgcaaagggaaaagaaagaagattgactcaggtggtggggggggggggggagcagtgacaggggacttccaacctaggcatgtaaaggggaactgagcagaagacttggaggtggtggtgacgacgacccttcactccatacctgcaggggctggatagggagaatcccagtgtcgtggacagaggctagtccatagtgattaagccttaactctcaacaggtgaatgaattcaacaagtcctgaggacacccattctttgcttctcttcccttagtgtgaagaccagaaggtggagtgcttgtatgaggctctgagacgtgcaggggacaggatcctgggctccttccccaccctggttcctcttgttctccattcttccatcagctacctcggcttcttcatcaacgacagccccgctgacgccatccgggaattcgccatggcgtttgccacagaggcggcagtcctggcaggtaggcaaccccagctgtgggcagacacactgaaccctttgggtcccagcagagccacatctaaggccttgatggatcagctcctgtgagtcctttaatgaccatctgccgagggatagtttggcttttgtccccagatgggtcctataggtctcaccttaaaaaggggctggggggagttgcagggggtatatctcagttggtagagtgcttgccagggcatgtgatttgacccttagtggtgcatactccagacatgaggtccatacacctgtaatccagaaagcggaggcaggaggatcagaagttcaagagcagccttcactacggagctagtttgagtcctgcctttattacataagaccctgtctcaagaagcaggaagaaagagagagagagagagagagagagagagagagagaaggagagagagagagagagagagagagagagagagaaggagagagagagagagagagagagagaaggaaaggagggaggggaaggagggagagagggagagaaggaagaaagagagaaaaaaaaaaaaaaaccttgaatctgcccattagaaatccccgcccagcgtccctctcccaggttacacaggatcccctcccaccaggaacctcagaatggaaccttacttagcagtgggctctttgaagattcaattaattaagatgaggtcactctggagtaaaatgatcctaaatcaataactggtgattgaaacctaaatcaataacatggtcctgcaaaagacacatggccataacaaagaggccacttgaccacagagacagagatgggcaggatggagccacagccaagggatgcctgaggccaccaggaaggagctggaagacaccagaggacccaaccccagagcctttggaaggaatatggccccgcccacatcttgatttttgagcttctggcctctgcagatctctgagacaataaacgcctgttgttttacaccacccagtttgggtattctgttgcaacaggaagtgtcatgctcacccatcctgatggcctgaaactttgcattatgcctctttgaatactaccaaggcctcacttcctggggaagctggccctgagctcacatccatctcctgaccctgagtgggttcttcctgccttcccaggttaaacctcaatctgacctgagaggctaggagactctcctgagatgacagctcaagagtgtcccaagtccctccctgcccacactgcctctctcggtgaaactgaacccaggtacacagagcaatacaaaaacaaaaacaaaagcctattcaggagtcagcatgactcacccctgggtctctggggaagccaggccaggtcttttcaaggctgtgctcactcacacagggagcacaccctcccgaactactaaaaagtgtcacaaaaaggatttcctacacatacataccttcttgccacctgtactggctgcttccccagcttagggctcagagacctggccagggtccagctggctgctaaatgtcacctagcatcatagtccctcctccttgctttcattaggggaataacacgtcctgtttgcttcctgacctggatgaagagctggcaagcagctcttgggcacagaggaccccatagtcctggaattagcaatctttagtctcaagtcctagctgtggcaaaggaaactaaatcacagcataactctcagccaaggcccctgtggtgacaaggacaaaagagccttgacataggtccacagcaaagtctgtcatttcttcaaagacaccagactgcctctgcagagtctataacgtttgtggtcccgctgacaccagctctgactgttcctgagagactgtcctgtcctctcttgcttaccagcctgaaagactcaaaagccaacctggagctgaggcgttctcaagggcagaggccatcacaactcactgggcttcagtgctatcaggcctccagtgaggaaagtctaatgagcattagacaggctgcaggttttatgtccatcgctcaaggagacccttctttaagcaagaggcattgacggggactggagacatagctcagagggtagagtgtgctcctagcaacagtgaggccctgggttcaatggctagcaacacataaaccaggaatgtagattcacactgatgatcctggcactcgggagacagaggcaggaagtccagaagttcaaagccatcctcagctatgtaacaagttcaaagcagtctaggacacatcagatcctgtctcaaatcaaaaccaaaaaccaaagagcaccaactgagagtctaggccccagtcatgtgtgcaccagagaacgaatggtccattttactgcatttcaagctagcttgcagcctaagagctcggaagaccttgagctatatctctgtgcctgtcctctgtttttggttttgtgtttttcgaaaactgcaagcattcaacctttctcatagtgagagcctggtccttgctttgtcaagaaagcgccaacactaaggagcctgtgcagtagaacagagcatgactaggagaggtttctgcctgttccaggcaggtagcattgacactcagggacaggttctcggcacccctattcccacctgacattcagaatagtacccaacatgttatgttcgcttgacattcgagatgagatactcagcatcctgcatgttcttgactccacagactgtaccatcaagccctgcaccaagcagctgcacctgaccttggcccataagttctaccctcaccatcaaaggaccctggagcagctggccaaagccatccagcccagccactcctgccaatggacagctgccctgtactcccgagacatgcgttttgtgcactaccaggtgagagaacctggcctggatggtaggctggcccagcctttcttactgattggaaatgaataaatgttcccctgacaacactcactcctacaatcttccctgacaaaaagagggggctcccttctgctagagccctctccttatgtgctgtttagaagtagcatccttttatagatgagttgggcacatacaatcatttcaaaagacaatgaaagcgctcccatggtattcagaaagcctgttgccaaggtgtgttaatacatagtctgcttgttaatttataatctataatggttttggtgggcttcatgccaagatttcctttcctaagagctgtgtagttaaggaagaaagtatgtcccacagggaataagcatgagggaggcacagcatcccctgtcataagggaaactataaatagtgtcacaccaagggaggtagatatatgtatttggtcacactgtaaggtctttcctataagagaaacacgtattgggagaaatgataggtagatagattggtaggtgggtaggtgaatggatggatgaatagattaaatgagtagattaatggatggacagatgaatgaatggtggttggatgggtggatggataagtggatagatgaatggagaaatgggtggagaaatgcatgggtagatagataaatgtcttaatgggtggattgataaatgaatgagagggaatggatagatgagtaggtggacagaatgagtggataggtagatgggatggtggatagatgagtaaatgaatggatggataaccagatagataaatgaattagaaatgggtaggtaaatggatgaataagtggatggatgggtggatagattcatacatacacagatagatacataaatagatacatagataatacatagatagctgcatagaatagatacgtacatacacgtacagatacatagatacatagatatacagataggtaggtagatagatagatacatagataggtaggtaggtagatatatagatagatacatacatacgtacatacatgcatagataggtacatagatacatacatagatgggaaaatgagtgtttgagtggatggacggaggaatacatgggtagatggtggtaggtaggcagaagaatagacaaacgtgggtaggcagacaaatgaatgtagacgtgggttggtgagtgagtgggtggatgggtagaaggaagaagatagacgttaaactttccttctaagtccaccctaagatttctaagctgcggcatttggctatgttccacactgcgtatcattaggcaaaggcatgaagggaccttggagacattagacacatcatcagaggagagtgaaggcgagacagactggtatctcctcctggggcttttgcttcacagagaaccctcactaagacgtgggtctcctgcctcctctctagaccctgaaggcgctgttccagtacaaaccccagaatgcagatgagctaatgctcagtgctggtgactacatcttcgtggaccccactcagcaagaagaggccagcgagggctgggccattgggatctcacatcggactggctgccggggcttcttgccagagaactacacggagcgagccaatgaggctgacacctgggttaagcacaggtgagaaccaccctctctctgtctgtcaccacctgaaacagtgggcacagtgcttctcaattctgtcattagaaagacttgcagtccctaccctggccacattacctccctgtccccctcttccccagtgtgcatggcaaacatctgatctattcgtggtttctgctgataaccctcaggaaatcagattgcttcaaattacttgtctgagataataatgctcaaatactgtgaaatatttccatctcatgaacatcacagagtgcacacggaggtcagaactggcccttgtagccttctaaggagggttagcagtttcctattgttctgtaacaaaatgacacaaatttaactgaatgatcctataaggctgtgatcctggcatggcttgcactgcattctcatctgatgcttagggtcctcccctaagcttgtgtggttgttggtaaaatgtatttcctggaagctggcctatgcttggtggtttgtttcttccagctcatttggcggatctctttattttagtatctagcaccatctgggctaagggttttcaaacttttcagaaccaagatgtttgtttcttaaatgtatcggttcctcccctcaatgtatctgtctcctctcccattttactataagcaaaaaggagaaacttggtgaaactttgatactgcacataggattggcatagttgtaaaaagataaagagatatagaatatgtcttatggagtgtggtgaggtgtggggggaggggggtgtttcagcgggcgcatgccaaggcatcccatccccctgaaggatcagtcacatgacgggtatagtatagaatagagtttattcggggcatggagaggggaattaagggggtaatagaggcagagaaaggcagagagagagagtagagaagtagaggccggcatggccatgagcacgtggagagaggggaaagggaagagcccaagagggcaagagagaagcaagagggaagcaagagtaagagagagggaggaggggcaagcagccccttttatactgggccaggcctacctggctgttgccaggtaactgtgaggtggagcttagacagaatgctaacagagataaccagagctacttacccaactccattctttatcggttctgtttcccatgaacaatgttgctaagcattttgctgcaacatggggtcctttcccccacttccatacctctgtcttgatcctatgggcatcctccaacccacaatctatatgtgctctgccgggaataaccatgactggttttttttctgtgtgtgtgtgtgtgtgtgtgtgtgtgtttgtgtgtttgcacttgcataaacattttgtgcatgtgtgttatacatatttgctggacagatctccgtgtattcagggagccccgccccctgccccgcatctctttgtatcacaaggcaaagctttggaaaccatactgttttatttatgcacctactggaagccagttaataagtgtggtaaaagttccagtagctaaaacttctgttttgaataaatcaagaagcaaggtattttgaatatttaaagcaaatgattgatttgggccatttagtggctgacaggatttcatggggaaaaggactttccaagtaattattatttttattaaatggagggtttcctgaaagtatttatgaaaggagatcgggtgacctctaggctactggttcttcctgttaaaattaagcttacatttgggtttgcatgacaggccagggacagcatctgtgcccttggactgtgccactaaatgcagtgacaacaaagtagatcccctaccacccctcccaaggctgccctgggactcactatgttgctatatagccaaggatgaccttttgagcttcgaatcctcctgcctccatctccagagagagcgctggtattacagatctgcgccgtcatgtgggtttcctgtatgctaggcagcagagctaaccatggattcttatatgcacttatgaatctgtcatgtatatatactaacttaaaatagcttttaaactgcatggattcggccagctccgcagcggggctatcccgcatcattttagcttcacgtgctaattcataaaacctgaggagcacacctgcaaacgcaggaaagaaaactcagccggattccagggctttcatatcaggtgtcccctcgtgacccgctaactcacaacaagggcctgtacagagagctacacacaccctcctgtgaaagctgagcccccagcctgggaggtgaagggctgaacaacgtcacaaaatcaaggaagctttggtttcctgcagaatctacatggtcagttagccgctctaaaaaaaaaaaaaaacaaaaaacaaaaacaaaaacaaaaacaaaaacaaaaacaagcagaagaacatagggcagggctggcatcaaactccaggaggctggggaggaggggctattaggccctgtcctccttgtctcccaccaagggcagaagacctcactgtgacagagaagccatcagccaagggacgagcctggactctgcggctactgcaaagcttctgcactaaactctgtctagcaacggttctacttcctgcagtatgtcacctgcacctggacaagtgcccctccttgtgaccctgaccttcctgggagaccagtttctctcaggaaccattgtacattcgtaaaagttgcaagaaaaaggaagttctggatgaatgctggggtgtatgtgatgagcttccacttccccgaccccaatctgacaccccatcccccaccccacacacacacaccaggataactacaagcactgtcccccaaccccaggctaactgtggtgtgacataggctgggaactggcagtaggctgtctatggcctttaaagctgctaaatattcttctaaacatttaaggaggttttaaattggggcatagtggcacccagacttaattccagtacttaggagacagaggcaggcggacctccatgagatccaaggtggccagtgctacacaatgacactgtcttaagggaagtcctggcaaatctgaatgtgtcatgaaagcgttaaacagtggggaatgtagactgacacctatgtgcatagagagttggcctgtggccagactatacgttgtatatacattccatatataactcccaagggcacaggactcacacagggtacgcttgatacaaacagcaagaagcacccagggagagatctgcataccacatgggaagaggccccttcctactcagaggaacctccccagccctgaaggtggctggcactggaacacattgtacttcacagacaacccccaccagcaccagtgtaaactctctagcaggtggctgcaagattctaaggaccctgtggtcccaatccaacaccacccacttgttacttggaaaccacatattactggaagatagctgtgggggacagaccaccgctacctcagtttcagccatcttcacagaacaagtatacagcccggctgcagatcagaaaggccggggctgagaatcagagcccaacagaagctgaagctgtcttccaaccacatgaagacctcccaccacagagctaatcaaatcccacaaatcgagctgtcaggttgaggcttccacacagcaagggcgggccgttgctggatgaactgtgtccctccaaacactcatatgctggagccctgatgaacatttatattagagaaagacctttcaattgaggggtcccttatccaatcttactttgatcagagttcactaaggatacaggggaagacactagcttctcaccaggcctaggacagagtccccaagatgaatcacaagttcctcctgtattgccttgatcttggacctcctacactccgggacagagagacaatgaaacctgttctgtcattgaagctgtgtgacagtaagcccagggcagacactaacacagcgactttgtctttaaatgccacacactgaggtgaatccccttctaggaacagaggtgaatagaaacttcatccacttctatggcatcagttaactgctaagtgacacacctaagtccaagaggaaaaaaaaaaaaaacccgacaaaatgtcacgtgcttccctctgtcccttcgccacccatgtgctcgccaacctcttgcttgcatttttagttgaatgactagcagacaaactcaacttcctctctgactgtaaagttcacagatgtcactcggagataacaatggttttactgtctgggcagtgggccccacgttacacatgtacccctgctttgccctcaggaagacgagagcagcctacacttcctgtgtgagggtgctttagctccatctgctctgcatgacaggtcattgaaagctgctctcagtggctgcagtgtatgtcacagttcagctccaggatccactgacacccgcactctatcccactggcatctgtagcttaagaacgcatgaagtccacgtcttattggtgtgtgcctttaatggccaagccatctctccagcccaggtccacatggaggagcccataagaggttatgaattgaaacaagacacgtcacaatgacagggacagagagccataacttatgggtaatctaaaaatacttgagaccagagaaatggctctgcaattaaaagcgctgactgttcttttagaggaccccagttcaattcccagcacccacagtgtggctcacaaccatctggaagtccagtcccaagggatctgatgccttcttctggcttcaatggctatcagccagaaccacaatgcacagacatacatgtagacaaagctcccatatatgtaaaataaaacatttaaacacatgaactgtatcaaaacgccacaaaggtcacagatggcccagagcgtggtcacaggtgtcaggcagacagctgctgccgagagactcagggcaagtgaggccgagtggctctagacagtctcgggctgggatggtggggaactgttccctgccagaaaggggctgagtaaataaaaacgcacctcatgggtggttgaggagagtgagtcagagagagctgtcaacttcagagtcacttccggttttacgatacttcagacaaaatcctgatgggatcattgctttgaatgccactgagtaaatgaggtatttacctagaagagacatcaggagagaaaagttgggaagacatcggggccaaagtaatgagaggagggatcaacacgcagctcaatgaatggagggctcgcccagtgcatacaaggccctgagtttgatctacagagtcctctaaacctggaatcccacactctttgcctacatagcttaaggcctacctgggatacctcagatcctgtctcaaaaaaaattttttaagaagatattaatggagctgaagagatggctcagtggttaagagcactgactgctctttcagaggtcctgagttcaattcccagcaaccacatggtggctcacaaccatctgtaatgggatccgatgtcctcttctgttgtgtctgaaaacagctacagtgtatgtgtgtgtgtgtatgtatatgnnnnnnnnnnnnnnnnnnnnnnnnnnnnnnnnnnnnnnnnnnnnnnnnnnnnnnnnnnnnnnnnnnnnnnnnnnnnnnnnnnnnnnnnnnnnnnnnnnnnnnnnnnnnnnnnnnnnnnngaagatacttactaatggtataatatatcaaaaattaaaatagggttttgggtcagaggctataaggcagtataaggtaacaaagagatttatctggcatcctgggaaatgcatgtctgagaaccccacagaagctgggggagaagggtgaatgacatccatggtaatttgttccccatacacttgtttacccaagtcagtgcctggcagagacaagaaataaacagaaagaacgtgtctttagacaaacatgcctccggcttcggtgatgggagagctttggtggggccgaagccaagaggtctctcagaacgcttggtaggcccatctttattggtgaccagtcaccgcttggcattcatgacctcggtacattcagaataaccagggcaccccagggcagaacaaggcaaggcctgagctttaatgaggtgagtctgctcctgtgaggggagcctgtctgagcattgcctttgaaaatggcagtgactctgatcccatgtgaccccgagccaaacattcacccaaaactagctcagtggtactgcgggtgtcactagtggagatccaggcttacagtggccaagtcaaatctcacagcctccacatctccttcaagagcaatgtcctgtggctcagctgcaaagtggggagttgagctcgcatctgtgtccgtggtaaagcactggtctaatgtgtgaggcccaggcatgatccataagactgcagagaaaggatgtcagggagaggaggggaagggagagaagaagaagggagagaagcctggtgtggaattctcccatcaccccagcgaggttcacactctgtgaacagcctctgctgttctgctaaccctcaagagagttgagccacccatgcacgcacccatgcacacacacacacacacacacacacacacacacacacacacaaacacacacactccgagtgcctgcctcctctgctcgctcctccatccccacctctatccccaaccacccacaggctgtgtcaatcacagccttgaggaatttgggagagctgcttccatccccagatagccagaagcctactcaaccaggccaccacccctgcattattgcagcccataatactctaccttctgaaacctagctatacaatctgcttccccctcctccccaaaaaagtggaccagagtctaaatatggatggatgcataaattaagttgttaaattcaacagccgacaaaaccatgaccatctttgcattttcagtgggtggtaaccatttcccacatttccagtaatgaatcaaactgttccttgtccataaaggaattggagaataaccttgctagatcaatagatgctcagatatagcaaaggttcttggacatagacggtggcaggcagaacttcgcatggaacacaacccagaagagcccagcgtgtctgtccaggaaccgcatgagtagctgtcactggggctggccattactttttaaacagtttaccaaaacttctccttgtcagaaatggcttcttccctgggaaaatcactcattttctgctctgaggaggagtcatatgctctgtcttggtcattctcccttctctctcgccacccgcctagtccttctggacaggaaggaactctgtatgcaccaaccccttcctgtttcatatcttggggttcgctttccagtttgctgtggctcttcccctacccgtgtgtccccagagttcctgactgcctgttcgcttcctggcactttaagtaatttacagtttcctggttacctgcacgtgctcaggtgccatcagtacccactacccacagaacacatctctagctcttgaggtgtctggtcactattacaatgtcccgactactttcagctgaacacctctgactacagtagatggtaaatcagcagatgatgtgtgaaaaaaatagatttgatatttactaaaggtacacaaccagtaagatatagagatgtagagggtgagatggggaggggatctgttgaagtttgtgattgacagatccaaagtctgaaggtcagcccagcaggtgggcccaggaaagatctggggctatagcttgagtctgaaggtaacctggagacagaatccactcttgctccatggagacctccatctctcctgccttaagactctcacctgaccctgcatgcatgggatcatctaatttattcaaggtttgctggtctcgccgctaatctcatcttaaaggtaccttcttagcagtgctgaaaacatcagaacttggcacagagacacacatccgcagtcccagcgacttggaaggctggggtgggaagctgtcttgagccttgagttctcggctagcctgagcgacaaggaaaacctgccatctctaaaataaagtcacatttgaagaacacctggccacagcagtgaggcaggctttattgtgatgctacaggcttcctgagccatgatctgggcgctctgcaacttggtgttcttttgtggccttgatccttactgcagaggttgaggcaggcattcccaggaacatccatgaccagaaaccatgatgaggccatgtcatgcctctgttcacagtttcttcttcctcccccacaggacgtatacattcaatctagccatggacctgaactctaggaaggattttgaagccagttgcaggggaaatggggaaccccacactccgtcaatgtcaaagagtgttagcagcatacaagctttgcaggtaacaggacccttgtgttgttgttattgtttgtttgtctgtttattgttttgctagtaaaccatgcttgctggtataataccatggtagacttggctgccagagtacggcttttctcccaagtgaaaatattgtagtaactacttaatctcaaatgggagtttctacctcacctttgatcatttggttcccagataaaagacacaaaacttttatatttatactaaggcttaatcagcacaagagctgggcaggtatctatcctctatgctattacatctacttccctgccaataaccctgagttaaaacctgctgtgttaagtctgggctgctcttaactttatctagccagccctcatggccatcttttcaagactcacctaccccatggtgtcgtctcctcttgccacctccttctccctcctggtagtctcctcagactccaagtctagaaactgaaaccctacttatctctcttctgcccagctatgaaatgtcagcatccttattcaactaatagtttttaatgaaggagcaaagtcacatagcattacttgatggacatgaggattctctggtccctaagagcaaacagaccttggggggcagtgtttagcattacaatacatagctacagaccaaacctcaccataaggtgcactcagcaccccccccccaggagcccctcctgaaggttgttgcatttctactaaggaccctggggctactccccaaacacaagcctcccaaggacactgtgggcacatgccctatgactgtgaagcaccaatgacagcctagaaaggaaggaatgttccagagagctgctgcccccaacacacacacacacacacacacacacacacacattgacctgaggctgctggacactgtcaggcaaacgttaaaacaaaataaaatacggcctctgtacctctagatcatggggtattttcccccactgattgaatcaaccagaggtggaaaatgttatagaagactgtatcttgtcttaatcagcttcccaatattgcaacaaagtacctaaaatgatcagctttcaaaaagaaaaaaaaaaaaaggaatggcttgttttgtgtttgtcatggtcttaaagtgttcagtccatcatcatttgatgggttgcctggggcttgttctggtgcagtttactacaatacaagcagacagtagaggagagtcagttacctgatagaagccagaaagcaaaaggaggaaggtgctgggtcccaagagcccttcaaagtcacaagtccagtgacctaccttcttcccaccaggctctcctccgaaagatcccactcttagcagtactatgggctgcaaccaagccttccaataacattcaagattcgaactggctgtggtaacacatatctgtaatcccagcacttgggaggcaaaagcaggaagatagctgtgagtctgagaccaacctgggctacatagaaagttctgggacagcctgggctatagtgtcagaacatgtttcaaataatgaaaacaagaaagaaagaaagaaagaaagaaagaaagaaagaaagaaagaaagaaagaaagaaagaaagagaaggggaaggagagagggggaggaagaaagagagagagagaaagggaggaaaggagagagagaggaaagaagagagaaaggaagaaagaaaggagggagggaaagagaaaagaaagaagaaaagaaggaagggagggagggagggagggnnnnnnnnnnnnnnnnnnnnnnnnnnnnnnnnnnnnnnnnnnnnnnnnnnnnnnnnnnnnnnnnnnnnnnnnnnnnnnnnnnnnnnnnnnnnnnnnnnnnnnnnnnnnnnnnnnnnnnnnnnnnnnnnnnnnggaggggaggggagggcagggcaggcaggcaggcaatagctgtgccagtattgaatgcatacagactttgtctgccactgttccctaagcaatatgacataattcctgttcacattaaatggcattaggcatttctgttgcctggagatgagttagagtccacagggtatgtgtttaccttcagtaaaaaacagcccattgttttatagaagggacttgtacatctgtgaacttcagtgcttgcaggagtccttagcccacttcaggtgcactgagggatgactgtcctactcactaagagcacttgggcaagcagagattgcccagctatgggaaggcagtgaggaagaagtggggaaggggtggggggagcttcttacctgagtgttcagaagcaagacactcacctgggcactgtgaggaagctgcctcgggatggactcaagtatggctaatcctggagggctccttggaagaggaagagtaggagtaactgagtaaactagagataaattgatatatgagagaaaaaaaagaggagagaaaggaaggaaggagagaaggaaggaaggaaggaaggaaggaaagaaagaaagaaaggaaggtaggaggggatggagggaagaagagagatggttatttggttattagatagatagatagatagacagacagacagacagacagacagacagacagacagacagacagacagatgtagggaaccaaatattcaaatacttaagcctatagaggatacttctcattacagccaccatagattgacaggtgatagatgatgatagaaggaaagagacagacagacagacagacacttggaagagacaaaacagttgaaaagtgtctgtgatgggctcaatcctctttccagctcttttatgaagtcacagagcccatgaaattaaacgtagggagaaatgaaagcaatcctccagccttacactgtgacactggcagcctgaccgaccacagttgctgaggagcttgggagaggctccgaccctaggcaatggctggtggatactgcagagtctgcttaataactcacgtcccattgctcccaccccaggctaccatctcgaggagaggcattctggtcatacgtcatggcgagagagtggaccaggtctttgggaagtcttggctacagcagtgtactactgctgatggtaggtggagtccagatgactctagacattattagctctctgtccttgagggaccctagaccatggcatagctcctgctgggagatgccagtgccctcaggctttggggccactaatgtggataaggaaacccacccacatacacactgtccacatgtctaagccaggcccttggcatcaggtcagtgattggtgacaattctggtttccccttttctctaatgagagaggttaaaccacttgtttctggtcacacagctaaggctcaggatttctaacagattgacagatcttagagatcaacatcaaagggaccagggtgtcacacagcccctgttttctggtcctgcattcaagcacctgactgaagagttcccatggcagggcacctccagccagtgtgtactgccccaccggcagcaacacacaagggaggcttcacactgcagccgcttaactgataactactccaaagcttatcctggcgatgcagctttctctcccctgtgaatgataaaggttaaaaggaaaaagcgggctcccggcccctggggtgcaaacctaagcgctctgcagttgagaacgttacaggcctgcaatatttgttctatgcagtcagttcacatcataagaacacttcacaaacgacatccttggcaagcactcagacaatagccttccctgcagagaggatctctgtcttgggggtcttgggtaacgagtggaatttgtctccgtggcctcagatgtctgctacttgtttctacctcaggaaaatactacaggccagacctgaacttcccccgcagcctgccaaggaggagcaacggcatcaaagactttgaaaacgatccaccgctatcatcctgtggaattttccaggccagacttgccggtatgtttcagagtattcccacaggagagtaacactaacaataatgactacattgtatccactgagcccctgctgtgcatcctttgatagtactggcatcttccctactctgccccaccaggaaatggagattgtcttagtaacagttctattgctgtgaagaaacgccaggaccaaggcagcttataaaaggaagcatttaattgggggcttgctttcagtttcggagggtgagtccatgattatcatggcagggagcatgctggcaggcagaccttcaggcatggtgctggaacaacagctgatagcttacctcctgacccataggcagaaggctgagggatactgggcctggcatgagcttttgaaacttcaaagcccatccccagtgacatacctcctccaacaaggccacacccccactccaacaaagccacacccactccaacaagaccataccttctaatccttcccaaacagttccactaattggggaccaaatatttaaatatgtggtggggggggggggcattctcattcaaatcaccacagatgttagatcatttacccagggtcacacagctagtggccaaaagtggagccgtctgatccaggagtgcatgattggtgatgcaagcaaggaaatatagggagggaacactgcagggagaagaaatagcaataaacactatatgcaccaagagtgaattaaaaccaagctggggagatagctcagttggtcaagtatttgcccagtgagcacatgggcctgggtttgatcctcagaacctacgtggaaaagccgggtgtggtggtatgcacttgtattcccagtgctgaggaagcagaggcagggtgctccccagggctccctggccagacaggctcgcctacaaggttaactccaggcccgtgagaaatgccattttaaatataagggtgaccggcattcttgataatgactgctgaggctgatctctgacctccacacacaagcatacatgcacacccgtatgtgtgcacacatgcacatgcacacacacagatacagtcacagatgcagacacacacagttacagacacacatgcacagacacacacacactttaaaagcacacacacacacccttacaggtaatattgcactacgactcatgcccttaagtttatgactggggtgtcttcttctgtgacatctaagagattgtgatgtttctctggttacatcatacaaattcggaaagctgagcctaagggggcaagcagacatcccagtccctggctgcttagctacaggaacccactagaattagctttcttgcttctcaccctgcgtgagccacaggcgctcactgccagctctcagggtgggaggctgggttcacactgtgactgtttcaggctcccagtcagacaacagttagttctggggttgggataccccaactgtacacagcccatttgggctcctccttccctaggagacatgacatgctcatatgtcatgtgagcctgtatgtgtgtcccagaagtcctgtcctcatgcccaaatacttacaaaggtgtttgaacagctcttggtgtatatacatgggagcatccggggatgtgttgcgtaggtaacaagtatccctagctactatatccctgccaccatttggtggcagaaattgaaatcccaagatcatggttcaagcagatagttccttctgaggctatgaggaagacttatctctccctattgctcaatggggtcttgccctgatatcttcacatcattcctttctgtctgtctctctactcagccttctcctttgcagaagacatgttggtacagaacgcagccttatgttaacttgttctcagttaccccatgggatgctgggggataggtggcaggatcctttgtgggcacagaatcccacacatatacgtatatatgcatgtgtatacatatatacatatgcatgtatatatgtatgtgtgtatatatatacatatatacatatatacgtatatacatatatacgtatatacgtatacacacacatatatatatgtatatatgtatatacatatatacaatatgcatatatgcatatatgcatatgtgcatatatacatatatacatatatacatatatacatatatacatatatacatatatgcatatatacatatatacatatacacatacatacatacatacatacatacatatcccatacattttgcatgaaatctgtgtgtttggtacagtcacaactttctgatattttttattcctattggtcaaagcctttgacacagatccattgattaaggtcccagtctatggatgtcagtattccaacttgcccataactgacaaccccaagcctcttgtcagaaatctcttgtgccatggggtttcctttgccaccagctaggcttctagtattacagagaagacatggttggattacagcttgtccttccacaagccaagatctgaccaacttaatggctgcaaaggtatagagctatgtgcaccttaagcttacagtgcaggtgtgacttgagtggagcatggcgggttttcagcccacagagtcacttttatctggtgcccaggcctccttccagactcacccaggctatgggcggagctcaggtcctcagggatgcagggctggggtctcccctggctgctattggtactttccacttctgaggctacacccatgtctggtaacgtgggacgctccatctttcaacacagctaaaggatatggttcacatgccaagtacgaccacattcaatgtctgctcgtttctgctctgtggccagctgggaggaacctgcactgcttacagcctcaacaacccctgtaccaccacctccaccatacaatataatgtagttacagaccattgatggtcacagttgcaggttctaccctaacctggttggggaccctgcaggtgtttacagcagtgggtaagagtctcatctatccctgcctgctaccaaggcaagtgcccatcctgggttgatgcatgaagggagctccctacctgttgtttcctaggagaagccctgctggacagcggcgtcagagtcaccgcggtcttcgcgtctccagccctgcgctgcgtgcagacagccaagcacatcctagaaggtaagaaactcagcaggccttgcctttggcttgatcttgaggatgttctccatggggagcaatgagggtgtggccacaactaagccaaaagacagttagaagccagccttctaggtgctgctggcagaaatatcccattaatatcccaaagtgctagggttgtacgactggtgtcacagggtcaacatctgtaatcatactttgccaagtggctcagctctgccaagtgtctcggtacttgggaatgaacattcacaagcctagagacctggagctactgagaacccttctagatccacaggtgacttcccagggcagggtcagcactggaggggagctgtccagcatctctcaactgtcaggaaaccattcacagatcctctcagccagtgagacaacattgccatgtgggtggctggtggtcaccaaggttctgcccccacttaggaagtgtccatatcaggagatagaaaccttctttgttcactgcagaacaaagttcctgaacaaagtcagcaccctgcctgccaccagggggcagaggccctgcccctagtctgaacccctcttgcttcatcccaagcacagagagccttacttgaccaggtctttttggtcaagatagaaagtgcttgggaggggtgaactgtgagaaatcagaatgttccagaagtttcctcccctactcttcacccccttgggactccctgtctccgtcactgtatcattccatcaaggatgaaactgcggcgtggattaagtgagctgtatatgtggttatagtgagaccccagggtgagcccactgcctacggtatccccatagccaagcatcatggcccctcttgatgggcagcatgctgtcagcccttggatccctccaaatgcctggtggtccgggtcttagagaaagcactgcttcacttggatcacaggatgatgtttgccagccaagagtcacacatgtgacatgtttccttggactcagttatgggttggtgttctggttcgcttttccattcctgtgataaaacactaaccaaaaccaaccggggaaggaagaggcatacttgacttacacttccacatcactgtccatcaatcggatcggtagtggtaggaactcaaagcgggaaccggaagcaggagctgaagccatggaggggtgctgcttatagccttgctccccgtggcttactcagcctgccttcttatagcacctaggattgcacgcccaggtgtgacaccacccacggtggttttggccctcccacatcagcaattaatcaaggatatggatgtaataatgtatgcctttaatcgcagtacttgggatgcagaggtgggcagatctccgtgagttcaaggactctgcatagtgaattccaggacagctagagacttgcctacagaccagtcttctcagttgagattccttcttcccatcatgactccagcttgtgtcaagttgacaaaaaacactaattaccaaggcggatataggatgaaggagtttctctaggtttgttgtatccaaatgcttgtttccattgacccaagaactcaaactggagaagaagctgaagataagagttgagcctggaatcttcgagtggatgaagtgggaagccagcaaggccacactgaccttcttgaccttggaggagctgaaagaagcaaacttcaatgttgaccttgattataggtatgtaccttgcaaatctctgccacccagagatttcttctgttaaagaagatctatctactgaggtagaaccatgcagtggagagtaaggtagattgagctgtgtatatagtaccagcaggatcggggcaatgagaagttgagggttatggtcttgctcagccaacccaaaactcctggcgaaggcagctacagtgaacacacaccacctagagatgagggaggctgggaaacctgaccacgcatggaagatgggggtattcctgataaagctgaccctgcacggatggacacagagggacctcacccagaagagggtcctgactctggtttgggatggggagtggctttgttcttcccctggggtgactatctccaggtagagtgagatgtacagctttcctgctgttcattcaacctccatgctggtggtgccacagccctttgccagtgtgagcacatccaggagcccctgctggctgtaaacccacgagccctgcctggcaggctctttagaggatcatggtcccactcagctactccagcatacccttgttcaccaggaggctccagaacagcagcccatgtctctttctatcttctttcaggccagcattgccccgctgctccctcatgccagctgagagctatgaccagtacgtggagagatgtgccgtgagcatggggcagatcatcaacacatgcccacaggacagtgagtgtcccgcaggcttgaggagggcagcctcaggcttccctgggatgggattggctgattctggcctgttagcgtctctacctcttcactcccatattctggccaagacagtacatcatctccaccatgacagggagtggatgcatatacacatactccatgtagcccatcttagttagggttttactgctgtgaagagacaccatgaccaagtcaactcttataaaggacaacattgaactgggtttcgaggttcagaccattatcatcaaggcaggaacatggtagtatccaggcaggcatggtacaggaggacctaagagttctacatcttcatctgaaggctgctaggagaagactgacttccaggcagctaggatgagggtctttaagctcatgcccacactgacatacctactccaacaaggccacacccattccaactaggccacacccactccaactaggccacgtctcctaatagtgccactccctgggtcaagcatatgcaaacaaactatctggtgctgagcatggatggccctagaacatcagggtcttcaccaactatgggaacaagagaagcccagaatgacagaaggatcaggtagccaatgcctaaggaaaaggaggctgagccatagcccttccaccctaaccaccagccacgctcccagctctcctggctccacaccatcaaccgctgcctctcccagcttcactttgtccagtgtgagacacacaccgaggtgctggatcccatcatgtcatctgaggtggctccccaagtcccactaacccttatctaaagcaggcagcatctcaggctcacagtgataagccagataaagtgattggctcgggtctggatagcagccatcacacacccacctgtggctgacaggacctaggcagccagccacaagaggatagaggctcagatcatccgtataccatccttgaagctggcacacagacaccacaccctagccctaggccccacatcacaaggtggtgtgctctaaatcatggcaaaagactgggtcttcctacccttgctacttcccacccaccacctcataggggcacggtagctggacccataagacattgaagaggcttatatgttgcaaagtgctctctgggcctgctctgaccttgaggtgttttgtctacagtgggcattacactcatcgtgagccacagctcagcgctcgactcctgcacaaggccactcctcgggctcccacccagagaatgtggggatttcgcccaactggtaagaaaggtatgtgaccctcttatacctctttaacctccaagtgaagcaagcgctgggtcatgcactctttatagaatgacaagcatccatcaaatccagggctggctatgtgaatgtgcctacctgctctcatggagggcatacctgcaggagctgtgggtaaacctgtcaccctaacacctgagtggcagtctccccggttctttgcaggcagcaatgtcaagaagtttcagagctagcccatagcccatctcctgtggctctaagagtataagggtcctgtgaagagtcaggagtcactgtttgagtaagagaaggctagaccctgtgtggtcctgccttcctcagtggggcctgggagcggtactgacagatagaaggaacttccacctactcaccttctgagtcatctgtcaaaggacaaatgggaactcactgtagctatttgtagcatgaccaggtgctgggccagtctcatgaaagactccaatgacaaactggtgacaaacatgctttggtggcactttgagtgacctattgaatatactccagcagatcagagagggaggtggccagaccatgaattattcatcttagactagctcttttcccctggtgaccagttctgtctctcttcctcatcaagataattaaccagtgatcctgtaccctgactctattggtatagaaaattactgataagagctaggcatgatggagcatgcttgctgtaattgcagctactcggcaggctgaggcaggctgacctcatgagcttatgagttacgggttctctaagcaacatagggaacctcagttgaaggagaaaggaggtaagagagaaggaaaagggaagaggaggaggaggaggaagatgagaacaaggacaagagaaaaaatgattcctataaattctaaactctagaactttcttatgctgaccacttaagagtctacatcaaccccattccaaattagacagcccagatcagaagtttatccaagggctctgctgacagatgattgaaaggactggtccttctaatcaggaccagcatgcaggaccctgagtattcaaggctttccactgactagcccattacaccctcctggcagtccctgtctgcagataggatgattcttttccccctgagtcagtggtagcatctgcttagattcctccctgcatcttgggatgtttgcaaattttgtctaaccaaagaattcctagacgttaaaaagagggtgaggcagtactgttaagaaaggcatgtggggggctggtgagatggctcaggggttaagagcaccaactgctcttccaaaggtcctgagttcaaatcccagcaaccacatggtggctcagaaccatctgtaacaaaatcggatgcctcttctggagtgtctgaagacagctacagtgtacttacatataataaataaatattttaaaaaaaggcatgtggacagagaagcctcaacacaaggatccaatgggctggtccattttacagatgaaggcacagaggtccaacgtttcaccttgtgctttgtcctatagtctaaacccacaatcctgaacctttctgtgttgctgaggcacaggtaagatagcttatagccagttgtcagggtctctcaccctcccaccctcgtagatatgtgggcctggtaattctgtgggaaaggaagactgacccatggctcccagaatgcttagcagtcccactccaagttgtaacgaatctctaggtaacaatgtaacccattgtcgggagcattgatcatccccaggcgaaattaaatggtaagtgctggcattggttccatggctccctggcagcctgggaccattgggtcccctccacgactgggaggcacattttcagtgggtttaagaaatgctccaacgttgattgacttgtaacagaatattataaacatactaaaccctcttccagattccatctctgggcatgtgcttctgtgaggaaaacagagaggacggaaagtgggacctggtgaatccgccagtaaagacgctgacacatggggccaactcggtctttaactggagaaactggatctcaagcaactgaggcagcccgagctttccaggaagaggtgactgccctatgccaaggcacaaggggctgtgataatggttacaaaggcatccaatgattacaaagttatcctagcctctcgcccagtgtgactggaggaaagaacaaaacacactcgatactcagggggaatagccatggctcagaccttcgtcactgccacccatggatctgctgtcctgccagcctctgcagaggccagagcagaggtctggattaggataccacattgcaacatgtgcactggtttggagagaacagaggaactgcctcacttccaggaactacagactccccgcacttgaagatgccacccatctattttgtatgttcttaggagccctccttattactataaccatcgctctttaggcagggccataccagctgaaaagggagcaatggtcaatgaaaaaagtggccagcccaccagatcaaaaccaggacagcagctggcaccagcactttaggggttccttgctgttgctcggacacagagttggagacagtagtgcttgaaagccatgcaaaattcctaacgcacagagacaaaatgtgtgattctggaggttagcggggtctgtgttcctctacagattctagaggactcttccccagccattccagaatccagaggcctctgtccttcctggcatcctatttattatattatattcctggcatctactaccttatgattctattcaaatcaatcagtttggggaaattctaaggcacggtcacatagcccctgccttgagcctcctgtctcaaagacgccatgacaaattgtgctcagtagcctaggatcttctctcatcttaagatccttggcaactaagcctgcaaagtcccttagccacaggggtcacttgttcatggtcccggaagttaggatgtgtcttagaaggccatcctccagcctacctcagcctctgttcttccaagcacattatggccgttgtaccagggtctagacataaagatctgtgcctcctacacacacttcgctcaggtcgttttctggctcctccttttctctcttctcaatgagcaggaagggatgggggctttgtgagtggaaggagggagccccttgccttaataggaaggggtggcagcactgtcacagcggggaaggccgttcctaagacctggactgagagaatgtgtaagcactgtatgtaaactcagcacgagctctggcttgggaacctctgatccagtggtaagtgggattctctgcatagtgtccttccacctcaccctacagaggccatcctgtccccaagtggccgacactgcacaagtgaattacactcagtcatccccacaccatgcttaaaaagtgggtgggggggtgttcttctttcccagcccccttttgcaaaattgtggttactttttacaaatttgtgctctgggctgcagcccaaggcaggaaggacctggaaagcaggagggaggaggtgagggaaggggtaaggaagggagggagggagaaattagggtagggagtcttgggggggggggcttatgtttctgagctcgtctgacccctgctggtgacatttggaaggacaccttcctctgggcactgccctggcccacctcccaacccacagtctttgatcttttcacttgagtttttaaagtaagattttgattgacacatgtcctgggcagagctacattctttcttctcaagttcaaccagtagacagttctgcagggttcagaggtggaaacaaagacaaatgatcctattggtggatgggccaaaagctcaaggcactcttccaccccaccctagaacctggggaagtctgggaagagacttgggggctgagccacctgaaaagctatttgagagtcaccactgtgggctgaatcagttcatcggtcacacagaagtcttgatcccagtactccagtgtgagactgtatttggagataggattgtttaaaaaaaagaagaagaagaagaagtgcatgtgagacacacatagacagagagaaagagaaagagagacagagagaaagagagagacagacagacagaatatatgtaagcactctatgtgtgcaggctacagggaataagtggttgtcagacactacctacctttacatagtgtcttagctacatttctattcttgtgacaaaacatgataactaaggcagttttgaaagcatttaattgggcatgcagcttcagagggctagagtccatgatggtagagcggaggcatcacaacagggatagttgagagttcacatcttgatccacccaccatgacacacctcttcaatctcctaggccctcccaaactcctaggtccaccaactgcggaccaagtgttcaaacatatgagcctaccagggttggagaaagggatgtggcattctcattcaaaccactacatttagtgtggtggtttgaatatgcttggcccagggaggtgcactattaggaggtgtggccttgttgaaggaagtgtatcactgtgctggtaagaaatgagaccctctccccagccacgtgggacccagtcttctcctagctgcttttgaaacaagaagtagaactctcagcaactccagcaccatatctgcctagacattgccatgatccgaccttgataatagattgaatctctgaacctgtaaaccagccccaattaaatgttgtctcttataagagttgccatggtcatggtatctcttcacagcaataagaccctaactaaggtgcttaggttttggatgctgaagtcaggaggccagccttgagcaccaagcatctttatcttctgagccatctttgttggcctggagtcaggaccttgaaaaaaggtacctggagccagcgtggtagtgcacacctttaatcccagcactcaggaggcagaggcaggcagatttctgagctcgaggccagcctggtctacaaagtaagttccaggacagccagggctacacagagaaaccctgtctcaaaaaaaccaaaaaagggtcctcatagcttcatatatttgaaagcttggtcatctgggaccggagggattaggaggtgtggcctggttggagtaggtgtgaccctgtgtatgggctttaggctttcagaagctgaagccaggcccagtggctttctctcttcctactgccttcagatccagaggtagaatgctccagcaccatgtctgccgtgtgtcaccatgcttcctgccttgaggataacagactaaactctgcaactgtaagcaagtcccaattgaatgctttcttttttaaaaagctgccatgatcatggtgtcccctttacagcaatagaacactgactgagacacacataccgagaagcaagcctgtgacgacatatcagaagacaccttctgggctggtgagatggctcagtgggtaagagcaccgactgctcttccgaaggtctgaagttcaaatcccagcaaccacatggtggctcacaaccaccgtaatgagatctaatgccctcttctggtgcgtctgaagacagctacagtgtacatataataaataaataaatcttaaaaaaaaaaaaagaagacaccttctacaagtcaaggagagagggctcaggaggaagcaggctgggtggtacctccatggagaatttcctttgaatcaagcatctagtccatgtacattgtatgtcagtgcatgcaagagcactcaaagtctcccacccaggagttgaacactaggcaggctatacagctccatatgaagtgccaatggccagacctgtctacatatcgtgcatacgatctgcactgcatggaggatacacgccaggtgtaagcaaagatgacttcattctttgtaaaggttttgtgcatcctaagatctcggtttgtacaaggatccagaagccaatccacagggaacaccagggaaccattactgagggtacagaacagacactggagtcagggaaacttggagggctcccgactggagcaaaggttattctgagaacaggaagtggttgtatctgaccaaatggtcttctacgatcactaagaatagacctgtcaacgtcagatatctctgagtcaagctcagaggcccagagcctggccctcaccacactctgtgggctgttgagtggtgatcagcccacccagggatggaactgtcttctccagctgcagtaacagttccgttacccttcatggggcagctggattacccagagctttctagaatgcctcgtagccccatggacaggtgtgccaagtctagcatgactaaccaaatgccagttcacagcatcaactccctggagggagaaggctatcactacctgggatttgagaaaattgactaaaatagattttctatatcctgaaatgcaagaaaatcatattaacaaaaatgtaaaatagcaattttgttggagtcagaaattcagggtatttaaaaaaaagaaagaaagaaagaaagaaaaaataagagacattcagaaatgactcctgaaaagacacagagtccaagaatggtttttgtgaactctggtttcctggaggaatataatgaaacgaaatgaaaatgtcatgaaggaacccattatattggagactgaaagtaaaaaaaaaaaaaaaagaaaaaagaaaagaaaagaaaagaaaagaaaagaatattaggtaaaatcaggtcccacattcaaggcatggggctgtcttcccactgtgaataattggaacctagccccaaaacacgggcaaattactgagatggacaacagtcaatggaagatggcagcttctgaagatgcaaggccctgaaatccacaggcacacctcatgctattacaggtccactctgccgtaaagcaaatgctgcaataaagtgaaccccataaaatctctggtctcccggtgagcatacaagttacaccacactgctctctgataagtatgtgatagggaaatgttttaaaatacaatgtatagaccttaatttaaaatattgctgaagccgggcagtggtggcacacacctttaatcccagcactcgggaggcagaggcaggcggatttctgagtttgaggccagtctggtctacagagtgagttccaggccagccagggctacacagagaaaccctgtctcgaaaaacaaacgagcatatatatgtattttgtgtgtgtgtgtgtgtatatatatatatatatatatatatatatatatatatatctgaaaaggaaaccggtaacaaccatcatagctattgggaaaatggtgtgagtagatttcaatggatttgcctgttgtaagattgccacaaactgagaaaaaaagaaagaaagaaaaagccataaagaaaaacccacatcaatgttctgcagaaagggataaagcaaagaaaatgaggtatgttccttgctgtagttaggaacacagacacattgtggtggttcgaataaaaaacggtcctcatagcttcatatatttgaacgcttggttatctgggaccagcactactggagatggattaggaggtgtggcctggttggagtaggtgtgacctactgttgctgtgagaaaacactctaacccttggtgttttggattcagaaatatttgtccaaatcccactctgttctcacgtctctgcccttgttcagatactaaacattttttagatcctcacattccacaccaatgtccctccattcttctgtgatctagtaatgcaagccattactctgccacacattctggaaggtttgaacctacatccctacaggctgtgtgtattgaacacttggcccccagctggtggtctggtagctccgcctccaggaggggggggggacgctattggacttacacttccgggtcacagcccatcactgagggaagtcagggctggaactggaggcagaaacctggaagaatgcggcttgctgactggctctttctcaggctcgtacttactcagctttctgatacagcccaggatacagcagctgcctgcagtggtaccagtcacagtgggctggaccctcttacatcagatacaaatcaagacagtctccacccaagacacacccacaggccaacctgattattgggagtttgttttgtgcttaggtgggaatttgcacatccgctgaaggtccctgccaactgttggttttttgccgggtcattgaagagccagcggccaatggctgggaaaggggagagaggcgggactttttggattcgcaggcaagaaatgctaaggaaagaagggaaagaatgaccaggattgggaagcagagcgatcagactaaagagcccactaacaggtaagactccaggtaagtggcctcacactcccccgattgggtctaggggagcagagatgaaatatagatttggcaagtataactcaggaatattggaggggaaagtgggttagccatgtggagttagggaggagccctgttgcactgttaaggcatgataaaaattaagctggcatgactttcatttgtgaatccagagctctatggagggtgcagagctgggagcatcgagtggcctataaatatttaccgcaacaccagatgacatcaactactcaactaagacaccttcttcaggtgattctgggctgtgtcaagttgacagttaatgctgagcagggcatcgtgcatggtcttaaagaaatggacaagaggcaacaatagaaacttaaaccctgaaactacctgtaggaaaatctgcagttatttatcatgggttttaatatctctctctcagtagttactaaaaacagaaagaaagaaagaaagaaagaaagaaagaaagaaagaaagaaagaaagaaagaaagaaagaaagaaaggaaggaaggaaggaaggaaggaaggaaggaaggaaggaaggaaggaaaaagatcaataaatacataaaagaccccaccgcactaccaatcaacttgacttaatcaatatttatggaacagctcaccacacagtggtatataatttattttcttttccagtacagtatggctctatttgccaaaaggaccacattctaggctagaaagcaaattgtaataaatgtaaaagtatttgagtcatgacatatacattttctctccataaatgaaaaagattagaaaagatgacagactacctaaaaagaaaatccacatatttgtaaactaataatgtacctggatcagagacaaaagccaaaacaggcaaaatgggacaggcaggacgcatctgccatgtgtaccaaaaagcctaaaaacctgagtttgatcctcggaacccacctggtggaaggagagaaccaactccctcccacaagttgtcctctgacctccgagtgcatgccatggtgtgcaagcacacacatttgcacacatacacacatgtctgtgcctcggactactcgcctcctgaccctacctgcccttgggggttggaggtgacgtggtgcagagtcaatgacacagattccgggagcaggtgagaaacacagcagcaagctctctgaacactgctgcaagctcctttaaaaccctccatccaagtccccattggccccaagaaagcatctcttctaaacaacagttcctgattggctggcattgtctgcaccagcaatccttgctctctcaggcagtcctcccttagatcctcctgtaggagatgcttttgtagctgtgcagcccccagcgtttatatagaggtgacctcgccatgcctgctacaacacaccataattttttaatctgagaaaaattttgaactttgttcaagaatggaaatacaacctatcagaatctgcgggaattaatacctctctaatattaaaagtcattacttgaagaaaaacctaaaatacatggccttaagtgtcctaactatgagtaacaagtaaaaaataatgactctgtaagagtccgaaaatttctgaaggaggaccccagactcagatagtatgcgtttattctgcagaaacagccagcatgcaagggttgccattgtttccaaatggcaatgcctactgagacatttgagttccttttctaactggattgcttaattgcttctgagataacagcagacttctaaaacttagggcacatttcaagggttaccattaacctaaggtcataaagaagatatataccacaggtgcaaaaacaggagataagatattgactgagtttgtctaaacaaaactacagtcttaaactccccccatgaccctccaaggcatatggtgaaaggtgagccagatcattgctccttgtgtatatgcatgtaagcattctctgttataacctctgattgatgttaagagatattaaggaaaagtggttgttacttccttttatttttgttgttagaggtgtagtcatgtttgtgtgactatcttctttggggtttgtagaaagattactttcttgctttttctagggtgtagtttccctccttgtgttagtgttttccatctattatcctatgtagggctggatttatggaaagatattgtataaattttgttttaccatggaatattttgttttctccatctatggtaattgagagttttgctgggtatagtagcctgggcaggcatttgtgttctcttagggtctgtataacatctgcccaggatcttctagctttcatagtctccgatgagaaatccggtgttattctgataggttacttgacctttatatgttacttgaccttttttctttattgcttttaatattctttctttgtttagtgcatttgatgttttgattaatatgtgatgggagaaaaatctttttctggtccagtctatttggagttctgtaggcttcttgtatgttcatggtcatctcttctctcgcacgctcgactggccaggaagaacgacgctgcaacaggatccttctgcacacgtttattgggagagcttgattgtagaggcgaaaagacttcgagcccagaactggtgctgcttttataggcctaggacaggtgttctctctcatctgattggttaacttgtctctcatctgattggttaacttgtctctcatctgattggttaacttttgtcaattctcaaaacctcaccttggcaaaagaacctttactggctatgtatgtgtggtggccagctgtagccaactgccactctgcaactgccactctgcaactgccactctgtaactgccactctgtaactgccactctgcaacggcttcccacaatctctttctttaggttagggaagttttcttctataattttgttgaagacatttactagccctttaagttgggaatcttcactctcttctacacctattatccttaggtttggtcttctcattgtgtcctggatttcctggatgttttgggttaggacctttttgcattttctttgactgttgtgtcaatgttttcaatgatatcttctgcacctgagattctctcttctatctcttgtattctgttggtgatgtgtgcatctatgactcctgatctctttcctagattttctaactccagggttgtctccctttgtgatttctttattgtttctatttcaatttttagatcttggatggttttgttcatttccttcacctgttggattgtgttttcctgtaattctttaagggatttttgtgtttcctctttaaaggcttccagctatttacctgtgttctcctgtatttctttaagggagttatttatgtccttcctaaagtcctctctcactgtcatgagaagttgttttagattggaatcttgcttttctggtgtgatggtgtattcaggacttgctatggtgggagaattgggttctgatgatgccaggtaacattggtttctgttgcttatgttcttatccttgcctcccaccatctgattatctctagagctacctgccctcactatatctgactggaccctgtccttcctgtgatcctggttgtgtcagaactcctcagagttcagctgtctctgggatcctgtgatcatcctgagaccctgggtgtgtcagaactcctgagagtcaagctctctgggaccctgagatcctggtgtgaccaagctcctgggatcctgggatcctgagatcctgtggtcctgggcgtgttagagcacctgggggtggagcttcttctgggtgttgtgggactgcctgaggagttagcttccaggctctgcctagcacatgcctttaatcacagcactccagaggcagaggcaggcagatctcggtgagttccaaaccaccctgaactacagattgagttccaggacagccagaactacacagagaaaccctgtctagaaacaacataaaacaaaacaagcaacacaacaaacaacaacaaaaaggaaaagagaaaaaatattaaaaacaacacacagactggcactttgaaaagatcaattaaacttagagaccccacgcaagctaaccagagcaagaaagagacaactccaaaacatcagaaacagggaggggcatggccacagagatggcaggtatgaaatatcacacccaacagaaacctttatccaagaaagcagctacttgagtgagacagacagttccctaagaacacagctaaccacgttcacagaggaaaataactggaggtcaggcctgcaccacatgcctgccaatcaagccttaagaggcagaggcatgagggcagccaggctgtctacacagttagttccaagtgaggactgcacagtgagtccctgccaccaaaaagaagaaaaaaaaaaaaaaagaagtaagggaggagggaaaagaggggggaaggggagaggagaggagggaagaagaggagaagggagggagagaagagggaggggaaaggagagaaggagaaggaaaggaagagaagggaaggggagaaaggagaggggagaggaagggaagagaaaggaaaagagaggagggaacggggaagggagagcaggagagaggagggagggatctgaagaaatctgcttggcggcagaacacttccccagcatgctcaaggccatgggttccaccattggaaaacaagcacgttgaaacacctcgcattgattagcagaaagcagtccacaaagagtgacagacaggagtgatttcattggtaaatcttgccagcctaactgctcgcactttctctgcggtgtcagtg

SEQ ID NO: 197 - DNA, 2950 bp, Mus musculus
caggctcaaagcactagcggccacagggaggaagacagccgaggcggcagcagactggagtatgctctcttcctctgccccacgggccccttgctggaaaaactccaagagttctggagagagagcagacggcagtgtgcaaagaacagagcacatgaggtcttccctcacgtgacactctgtgactttttcacgtgtgaagaccagaaggtggagtgcttgtatgaggctctgagacgtgcaggggacaggatcctgggctccttccccaccctggttcctcttgttctccattcttccatcagctacctcggcttcttcatcaacgacagccccgctgacgccatccgggaattcgccatggcgtttgccacagaggcggcagtcctggcagactgtaccatcaagccctgcaccaagcagctgcacctgaccttggcccataagttctaccctcaccatcaaaggaccctggagcagctggccaaagccatccagcccagccactcctgccaatggacagctgccctgtactcccgagacatgcgttttgtgcactaccagaccctgaaggcgctgttccagtacaaaccccagaatgcagatgagctaatgctcagtgctggtgactacatcttcgtggaccccactcagcaagaagaggccagcgagggctgggccattgggatctcacatcggactggctgccggggcttcttgccagagaactacacggagcgagccaatgaggctgacacctgggttaagcacaggacgtatacattcaatctagccatggacctgaactctaggaaggattttgaagccagttgcaggggaaatggggaaccccacactccgtcaatgtcaaagagtgttagcagcatacaagctttgcaggctaccatctcgaggagaggcattctggtcatacgtcatggcgagagagtggaccaggtctttgggaagtcttggctacagcagtgtactactgctgatggaaaatactacaggccagacctgaacttcccccgcagcctgccaaggaggagcaacggcatcaaagactttgaaaacgatccaccgctatcatcctgtggaattttccaggccagacttgccggagaagccctgctggacagcggcgtcagagtcaccgcggtcttcgcgtctccagccctgcgctgcgtgcagacagccaagcacatcctagaagaactcaaactggagaagaagctgaagataagagttgagcctggaatcttcgagtggatgaagtgggaagccagcaaggccacactgaccttcttgaccttggaggagctgaaagaagcaaacttcaatgttgaccttgattataggccagcattgccccgctgctccctcatgccagctgagagctatgaccagtacgtggagagatgtgccgtgagcatggggcagatcatcaacacatgcccacaggacatgggcattacactcatcgtgagccacagctcagcgctcgactcctgcacaaggccactcctcgggctcccacccagagaatgtggggatttcgcccaactgattccatctctgggcatgtgcttctgtgaggaaaacagagaggacggaaagtgggacctggtgaatccgccagtaaagacgctgacacatggggccaactcggtctttaactggagaaactggatctcaagcaactgaggcagcccgagctttccaggaagaggtgactgccctatgccaaggcacaaggggctgtgataatggttacaaaggcatccaatgattacaaagttatcctagcctctcgcccagtgtgactggaggaaagaacaaaacacactcgatactcagggggaatagccatggctcagaccttcgtcactgccacccatggatctgctgtcctgccagcctctgcagaggccagagcagaggtctggattaggataccacattgcaacatgtgcactggtttggagagaacagaggaactgcctcacttccaggaactacagactccccgcacttgaagatgccacccatctattttgtatgttcttaggagccctccttattactataaccatcgctctttaggcagggccataccagctgaaaagggagcaatggtcaatgaaaaaagtggccagcccaccagatcaaaaccaggacagcagctggcaccagcactttaggggttccttgctgttgctcggacacagagttggagacagtagtgcttgaaagccatgcaaaattcctaacgcacagagacaaaatgtgtgattctggaggttagcggggtctgtgttcctctacagattctagaggactcttccccagccattccagaatccagaggcctctgtccttcctggcatcctatttattatattatattcctggcatctactaccttatgattctattcaaatcaatcagtttggggaaattctaaggcacggtcacatagcccctgccttgagcctcctgtctcaaagacgccatgacaaattgtgctcagtagcctaggatcttctctcatcttaagatccttggcaactaagcctgcaaagtcccttagccacaggggtcacttgttcatggtcccggaagttaggatgtgtcttagaaggccatcctccagcctacctcagcctctgttcttccaagcacattatggccgttgtaccagggtctagacataaagatctgtgcctcctacacacacttcgctcaggtcgttttctggctcctccttttctctcttctcaatgagcaggaagggatgggggctttgtgagtggaaggagggagccccttgccttaataggaaggggtggcagcactgtcacagcggggaaggccgttcctaagacctggactgagagaatgtgtaagcactgtatgtaaactcagcacgagctctggcttgggaacc

SEQ ID NO: 198 - protein, 560 aa, Mus musculus
QAQSTSGHREEDSRGGSRLEYALFLCPTGPLLEKLQEFWRESRRQCAKNRAHEVFPHVTLCDFFTCEDQKVECLYEALRRAGDRILGSFPTLVPLVLHSSISYLGFFINDSPADAIREFAMAFATEAAVLADCTIKPCTKQLHLTLAHKFYPHHQRTLEQLAKAIQPSHSCQWTAAKRDMRFVHYQTLKALFQYKPQNADELMLSAGDYIFVDPTQQEEASEGWAIGISHRTGCRGFLPENYTERANEADTWVKHRTYTFNLAMDLNSRKDFEASCRGNGEPHTPSMSKSVSSIQALQATISRRGILVIRHGERVDQVFGKSWLQQCTTADGKYYRPDLNFPRSLPRRSNGIKDFENDPPLSSCGIFQARLAGEALLDSGVRVTAVFDALRCVQTAKHIELKLEKKLKIRVEPGIFEWMKWEASKATLTFLTLEELKEANFNVDLDYRPALPRCSLMPAESYDQYVERCAVSMGQIINTCPQDMGITLIVSHSSALDSCWLLGLPPRECGDFAQLIPSLGMCFCEENREDGKWDLVNPPVKTLTHGANSVFNWRNWISSN

SEQ ID NO: 199 - DNA, 63751 bp, Homo sapiens
gaaggtgatattgttaaaattttttaaaagcttcaaaataatacaaatagtacatgttacttccaaaggaaatatagatatatagatagaaaaaggcaagaaattcaataataaattgctaataggattatctctgagtaatgatgccgtcgtgggtaatttttaaaaatcttttcaatgaactgtattttctaaactgttcttctaatgaacaatacattactctatttacgaggaaaagtttttgttcctccccactacttagtcatagcaaaataatcaaaaaataagagaaaggaatattatagtgctattaatattcatattatttatattataaaagattaggaacaactataggtcaaactatgatcaaatggctgtgtaaattgcatatctacttgatggaatactgtgattccataagaaaaaatttataaaaaccttttatggaaaaaacccacctgcctatatctgtactgtgcatgaaaccacacatacgggcaaaagcaggaagagactttgcagacataaaaaccaggtaagttttgggagtcaggtgattgcaagatttttttttctttcattgacacttagctaattttgagccatatttttaaatgtgtgtcttttcagttacttgaaacctcttctcccacctcccatcctttccaaacctcctccaagccaattttccagttggtttaaaagaaatcattagggtgacccccactcccactttctggaacctcaggcagagctcctgtggttcctccctagcaccaatgtgtcaggaatctgcctgcgtccaagccctgacttccagaaccggcaaccccacagctccctttgaccagtcctgactatctctggtcaaaaagatcctagccgtataggttgctagagagtccactgttttatcaggcatttgtgacttatttacgaaaccaacttttttccttcagttgttaggagccactccgtcatctgctgctggattttaatctaggcctctaatatctttggcgacatccagtttatcctgagttttcggagggactggtggccactgcttctcaggacttcctggaggactcagagatttcctggccaggatctgacctccttcaggattgacaggacaattgtggagccccagtctctgaaaacctccaacaagagaagaaaacaccggtctccagggagagagcaaagggcttaacgaaacgatcccctctccaatgccccttctccctgagattctgcagatctagggaagtgcaggtgtccagcctgtgggtgtcagaatggctggggagatatttcccccacagggacagtcagtcacattggtcacctacatgagggtatgggcagaaatcacagagtcctcacctgggtccacttacctggtgcaacaggacttattttcaaatcatcaaggccaaaaagcgatcggaatgagaagggggcttcaacagcaggcggatcattttcccccatggtgactatttcaggacctctgacatccggctccgcctccacctctacctccttagccgaggaagaacagaaagcatttgttcccctatttatacttgtagcatcaggtgcatcttggtcatacggtaaatctttgaaattcgacagtccacacaaagcgcattcagtatcgattaaccaaaaacagtcatctggtgagaatgcattttcgtctgagctacagcagataacagaaaagcttctagaattagcaaaaaaaaaaaaaaaaaaaaagtatgaacttaattctgctaagacaatgactttcccattgtttgtccaaccaatcttcaaatcgattgctttagagggactccctctcaccatttagaagttgccatattgctattgttcagaagataaattactctcaaagccctttccattgcttttttgcgattgttttcacctgtcccacataaacgcaattctttccctgtgcgtgtggtacacctaccataagcataagtagtttcggtactcacataattcccgagtcccaaaaatgtagatggcaccacggaagagatagtaggccacagtgttactggcttcccataaacacagccctttcctggctcacacgggcatgacctaattaagaacgaaagtacccgagccgtccggtgcccggtccttcccccacatagcaaagtggggagtggctttggaccaacggcttgcatcaaaataaccccggggctgtgtttcctacgaaagaattccacctatcacaatgccaaggagaccagagacctttctaagtcattccctgtaactctgagagggcggaggaagcagggaaatagcagaagattcccaattaaattctagttccctctcccagatatcaggcatggctgctctgggaacctgcttcctccaagggctaaaatccacaggggctccagcaggcacatcagcacagacactcagatcatccgctttcattccctttgtgactacctgttgtaacgtttgaaattccaaagggatctagtaagccatttgaagcaacccgtgtttcccaagatcatagtaaaatctaaacaagagttctgtgccaaaaatgttcatttcatttctatcgcaagaagagcttgaaagagtaacttagaaaagcaagaagttcatgttgggccattttctggctttcattcttgctgatacctctgtttattatcagcatgtagcaaattacatcgtttatccatataaaaagaataagtgggcaaatggcttctgaaagatggaacctgggtgagaacatcccctcccaaacaggctgtggttggcaagctgtacaacactgagaagtgttgagaagcatcttctctcctcacacccattttactcaccatttctggagctgccatcattaaaagcagaaataatttcctttttcattataaaaacaagtgtgatggtaagcaggccgccaacaggttagtccaatcggggaatattttccccaagtcactcagccttgtcgactcaatcatcgcagcaaatggcattatcgcgggcatctgtgtaacccaagctgccgtgggcctatcaaatagcccttggtggtatggctgcagagaccagggagggaaaaatgtggcttccctttaattagtcagtaaggtgagcaaaccttttcagaagctttgcatcagggagtgatcggaacacagccgctccttttacttgaaagaaggggtaggctctgcccagtgctgagcatgtgaccgtcaagagggcagacatactctctggtgggggtttctgtccctccctgtaactgagcccccaagttcaattctgcagctactcctgcagacaaaagatggggagcctgaagatgctcatcacagcctgcgctccacaaaagacacgtcatgtttccttcctcggaggcctctgcatcccaagaggcttctgcacacagcactgcttaaaggggtttaaccgctgctgtggggaccagagcgctgagcatctttgaagggctgaatttaccattgtggatggcaactcgcaaatccatgcatttattcagcaaatatttagcaagcatctgccatgggccagactctagacacagtgcagccagcaagaaaaacaaagtgctcccatggggccccagatgttaagcgctaggaagagattaggccggggagggtctgagagagatgagggcagagtggtacaggacggcctctagggagagtgttgtttcagcagggaccttgatgatgttttagtagagaccttggtgaccagtgaagtgagtcttgtgaaattcctccaaggagggcgaccaccagctccaaagcctggaataggggccacgctggagtgtttgaggaaccccaagaggggccgtgagcctagaaagcagggaacagggaatagccgatggcagatcccaaggcccaggggcatgggaagggctctggtttgcctttgatgtgtggaaagccttgggcgatctcaatggggcaaatttgggttgacaggcagggcatagagtggggtaaggatggggggacacaaggacagccacaaggaggctgcacctcatgggccacaagggccatgactcggcacgagtggtgatgacggtgaggactggctgcctgaggttgattttgaaggcagaattggcaggatgtgctgacggcaaacgcctgagagatgcgtccaggcagtccttgattaagacagtcttactttctccgtcccagtaggtacctgcccacacacctgtcagtgcctttgggtgtgatctatggtctccttcaagctcacacatctctccttcacctatttcctgactactctttctggtccctcaacgaatgtttgccctcaaaggcaatgacaggaaatttaacatgtcattctttctttgcttttacctgtgtgttataggagatgctccccgctggagtacagctctggcgggacagagtctggaatgcactttcactcctaagaccccgccgtgcccagcacagccatgtgtgtgtgacaggggctctgtctgcatagaagagctgatcataaaccctggggggacaaataacaccaaatcgacatacaataaccaactacgagggcatgttaacacgtgtgtcagatgtaggtcaaaggtcaagccagctccccacggggtagcagggagaggccctacaagggtggctggtcttccttgctgtaaaatatcctctcagaaagtttaccgacaaatcaattccactgagctcaaactaaaattttgaggaaccaaacaaataagcttatctggggcccagcgcgtgatagttacgcagccagtgccatgagcagacttggtttcagggcatgagcgccttatcctatcctgatgtctcctgggagccccatgaagctttagtaacgatttgcaaacagcttgagttacaggcacattctcttcagtaagtgagggaggaaactggtagactcttccctgatgggcttggaagataacttttcaagttaggaaggcaggatgaagctagatgtaggcatcttctggcctacacaaataagatttttttaagagaaatgcatagaagcatttttcattttaatatgttataaacataacacaattgctcaaaacagggtttattatttagaagagaaaaatatacttgagtagagactatatttcatacccaaatctactttttccctctgggtcacaagctttctctatttgcagactttcaaattcaagataaatcatttgattgtggaattatttcatcttttgaattcctcaaagaaaaaggataatgaagtgtgtggacattatgctaaatgaaataagccagacggagaaagacaaatactgcaggatcgcacttatatgtggaatcttaaaaaaaaaaaaaaaaaaaaaaaaaaaaaaaaaaaaaaaaaaaaaaagttgaatacatagagaataaagtggggttctcaggggagggtgtaggggcaggaaatggagaggtgtggatcaaagggtgcaaagctgcagatgtgtaggatgaagaagtccagagacggaagatacagctgacagccagaggtataatatcttattgaatactgaaaatttgcccacagcagattttagtttcggttaccatgaaaaaaaagtaaaaaaagtaacaatgcaagatgatagatatgttaatttgcttgatgacagcgctcatttcactattatgaatatagcaaaacatcccattgtacaccttaaatacgtacagtaaaaagaatattattattatatttatttattattattattattattttgagactgtctcactctgtcaccccggctggagtgcagtggcgtgatctcagctcactgcaagctctgtctcccaggttcacgccattctcctgcctcagcctcccaagtagctgggactacaggctaccaccctgcccggctaatatttttgtatttttaatagagacagggtttcactgtgttagccaggatggtctcgatctcctgaccttatgatccgcccacctcagcctcccaaattgctgggattacaggcatgagccaccgcgcccggccccaaaagaatattatttaaaaatcaggcagggcacagtggctcacacctgtaatcccagcactttgggaagctgaggcaggtggatcacctgaggtctggagttccagccgggccaacatagtgaaaccccatctctactaaatatataaaaattagccaggcatggtggtgtacgcctgtagtcccagccactcgggaggctgaggcaggagaatcacttgaacccaggaggcagaggttgcagtgagcctagatcatgccaccgcactccagcctgggtgacggagtgagattctgcctcaaaaaagtgaaaataaaactatacaaataaatatcacaatatgctcacatttaatggtgaaatattgagaccttgtcctctgaaatggagagttatacaagaaggtgcactagtaccacatctgttcaacatttgacttgggttccaagtcagtgcaataaaggcaaaaaaaatagaaggaactattatgcgtagagctgccatgaacattcatagaccaatctttgtgtggacacacgttttcatgtatatttacctttataagaaaccctccaaatgttccccaaagtggttggacagttacgcattcccaccagcacagtgtgagagctcctgttactccccagccttgtgtaaacctggtattttccattttagctcttctggtgggtgtgctgtggaatcacattgcggttttaatttgcatttccctgatgactaatgatgttgagcatcttttcatgtctatgtatatatcttctttttaaaagtatcttttttgatactttgcccattcttaaaatagatgcttgttttcttattatttgttataagtatatataaaatattctgtatattctagaaacaagtcctttgtcagctatatgtatagtgatactttctcccagtctgtggttcaccttattatactctttaagatgtctttcaaagagcagaagttttcaactttggtgaagtacagttcatcaactttttcttttgttggtttattcgctttatgtcctaagaaagttttgcaaactccaacatagcaaacattttttttctaggttttcttaaggagttttatagttttagcatttacattttgagttaatttttgtatataatgtgaggtaagggttgaggttcgtttttcctcctaccaatatgcagttttcctagcactaatttttttttttttttttttcagacagggtctcattctgtcacccaggctggaatgcagtgatgcaatcacagctcattgcagcctcgatttcttgggcttaagccatcatcccacttcagcctcctgagtagctggaactaatgccaccatgtcttttttttttttttttttaagagacggagtctcactctgctgccctggctgatctcaaactcctgggcccaagtgatcctcccactttggcctcccaaactgctgagattatgggctgagcctctagcaccatttatcaaaagcattatccttcccccattgaatttcattggcatccttgttgaaaatcaattgattgtaggtgtgaatctttttgcactacccaatgacacactatgacacaccatggcaacctgatttgtaaatgtttatgaaaaagcaaaggacaaaaccagagggtttagcactatagtgattaaaacagtgtagaatgggcacaaagagggacaaatcaaacaagagagcacacaagttagaaaaaactaatccatatacagtcacttgatttacaataagcctcctactgcaattcactgggcaaaggatagccctttcaatgcggaagtagatgaaagtttacccctacctcacaccatacacagaatgaattcaaatggatcatagagctaaatatgaagagcaaaagtagcaaaacttctagaacaaaacatagatgatcttcatcgatgttggattaacaacaatctcttgaacaggatgcagaaaactctaaccagagttcccacaaattgataagaaaagcaaacaccctagtgaaaaaaaaaaaagagcagaatatctgaacaggaacttccccagagaggatattcaaatgggcaataagcctgtgaaatggtgcccaatatcattatccctcagggaaatacaaatgggaaccacagggagatacaactacacaccacccccaccacagagtggctaaaattagggactgataatattaagtgtgcatgaggatatagagctttgtacaactgcttggcagttcctaatggagtttcacgtgctctgtgatccaacaaccccactcctagatgcacacctaacagaaatgcatgcacaaggcactcaaagacacatacaagaacgtcctcagcaacattagttacaatagcaaaacaaccgaaaacttcctgaatgcatatcaacagagaaatggataaatgaattatgttatatttattttatttatttatttttgagctggagtctcactctgtcccaggctggagtgcagtgatgcaatctttgctcactgtaacctccacctcctgggttcaaatgattctcctgcttcaccctcctgagtagctgggattacaggcatgcaccaccatgcccaactaatttttgtattttttagtagagacagggtttcaacatgttggccaggctggtctcgaactcctgacctcaggtgatccaccccccccttggcctcccaaagtcccaaagtgctgggattacaggcgtgagccaccacgcctggctggtatatttattaatcaaatactacacagcaataacagtgaactaactgtggctacaagcaataatgtggataaattttacaggcataatttgaggaaaaagaaatgagatatgatagagaatatgctatatggttctatttacataaggctcaaccacaggcacaattcatatacaagtgatacagcagtttactttctgggggagggaggagataactggaggaggctgagctgggggcagaggtgcatctgaggttctgagaatgttccagagcaggctatctccaccttggcactagtgaaattttgttggggagactgtcctgggcactgtgacattcccggcctctacccactagtgccggtaccacgatgtccaccccacccaccaccacccccgcctcattttggaaacaaaaatgtctccagacatttccaaatgtccccttgggtggaggaggtacaaaattcccctggttgccctgtttgattttgggtcgtgggggaattaggggtgtgggctcatttatggaaattccttgagctatacacatatgattcatcaacttttctgtacacatataaagcttttaaagtttttaaaataaaaaaacaagtcaatgaatgactgaaagaaccagtaagttttccagcaatccgagacaatagatagagtggggtttaatgtcttgttcacagacaaggagactgggatccagggtgggtcagggcagggggccagcaggatccaggagggaactcattccctgacttctcctccgcttccttcccccatgctctcacgcattcttgctcccgaatactagccaagtccctacagaggctgatcccgtgcaggggctcggttggacctttagcctcaaactcccgtggtggaaacagttaggattggtggacgctgcacccagcatcctgcaaacagaattctgaaaactgatatctcatgcaaacaggatatcaacttttgtcagaaagatcaaaaagagcttgaggtttttcttcacagcctcagccttgcctctccccctcttgctttatctcctcatttctgtgtgcaggcgagcttcttggcctaagggcaggaagagatggcagcgggggagacgcagctctacgccaaggtctccaacaagctcaagagccgcagcagcccctcgctcctggagcccctcctggccatgggcttcccggtgcacaccgcgtgagtactgcccagagaccccggggcccagccagtaaggctggtgccagaccctgctgcggcccccggcatggagctgcaggggtgtagggtacggcttcctgccaaagcagtgcaccttgcagggtaagacactgcctcttcacagggccctcttctgcttctcgtaaatgaggtgatcttgaccaagcttgtccaacccacatgaggcccaggacagctttgggcttaagccatcatcccacctcagcctcctaaggctgccctgttcaatttgtgttggctgcccaacacaaattggtaaactttcttaaaatattatgagattttttttttagctcattagctattattagtgttagcgtattttatgtgtggcccagggaggcacaagaatacccctgatattcttgaccttttaaagaccagctcggctggctgactgggggaccctgaaatttgtgaaaatcagaagccatgtattactctgggtgccccattttgggggtttggaggagattggggcctggttgtaatctctttgtgtgcagctcagtgactctgaaagtggcgtttcaagatattcaaactctaacgtgaaaggccccaaagcccgctgagtctctaacactgggaccaactgtcagcagggctgtgcttccacgctgcccggggaaagtcacttgtcctcagagacaatcccttgagtgtctgataacgaaacaaatgggtaggaaacttcagacacagtgtgagcgcgaccctgcttacccaagggaaaggcctgcatgtggaagagcttagccttcagagttaccactctcggagagggaggccacgacaccaacattgggttacagctttcatggcaaaccagtgccttaaatctgacccattcattttttcacatggaaaaatgtatcagaaacacactttaaatctgacccattcattttttcacatggaaaaatgtatcagaaacacactttaggtaactttgggttggggaaggagctaaactttccttccacactataacaaaagcttggccaaattgggtgaagtaactctgaagctagacaaacccatttcttctccccaaatcagggctttgtcgtcactgttatgttcaagctaagccaggggcctttgaatggggagtggggtcaggcatgtgcagggcggccaccgggcaccgtccaggcattacagacaaggcagcttttgtccactgctcaccacccagtgcaggcaggacactgggcccagagagtgcattagtggcggaggtggaacccgaaccagctttccatgcctttgaaggagtccacgctggattttactactaaacgtatagcatggacttctactcaaaattccttccagtttaaacattaagcacatgttggaggaagagaaatgtgtgttaatttccccacaccagagcacctcatagtaagtgccctgcaccaaggctgccttgttcaaacctctccaggtggccacagccccatcggtgcccacccaaatagcagcattcggcatcatgtggtgggttcctcatggacgcccgctgtttccagtctgcattcctgataaattacctttgctatattccattctgtttcatttggtccagttctgcccaattcaatgcaatgtacttacgtcccgggttaccgtgatgaataagactcagtcctgtgttcagggagttcttggtctagcaggggagagccgtgggtgcaaggggactgtgtaagccgtaacaagtgcctgcctgggtgctttggaaagggctgtttcccagcagagaggtgtgggaggcgagcctggggatcagggtcgctgatgctggggtgaggaaagcgtgtgtccgagccaggggcacgttccgcagggtgggtccatttgatctaggcagtggggggggggggggcaggccagggagagggattgcaggagcgggcggaggtcaggtcctcagccctgagaccccgtgccaagggctgaagcgggtagccagggaaggacagtgagggggaggtgtgagctggtcagcattgtccaaaaccacgatggcagcactcaggggacaggcgctagaacttccagctggaagttcagcatcaggccctcttcagagcaccccccaaagatcctgggtgtgcaaggccacaccctgcctctctgacccttttcccaagaatgggcgacgtgactttgtgtctgtgtctgctcttctgcaggctgaaagcgttggcagccacggggaggaagacggcggaggaggccttggcctggtgagtgcagctgcttctgtagacccaggggcgtttgggctgaattccctgtgcctaaggactccctcccaccagggctgataccaggaagagccgggcgcctctgggtgggatggggccactgcggaagtgaaacaaaataacctccctgcctacccatagtgcactgagggaggggcacagggctttggttaaccatggaaagagaaagagagaactctgaacaaggctttcttcacttacaaacctgattcaatccaatttgactgccaagaagaacaggttcatgtgctttgttgagtaaatggggaagacatgattgttgtgttgtgataagcacgtaaatgagggtaattgttagaataaagtaattaggttaaaaatggtaacatttgggtttatattagtactgctaatattcagcctatttcagtaattgaagagcaggctgggattttgcatacttgtgtttgattatgtcctcctcaactgcctactacgatggataagattgagatagataggaggatgtttgtgtttattgatggaaagatttgagacataattgacatctttgctgatagagactagcggccaccatgctctcgggctgcctctgaggggaagggagtttactggtggtcatgaagccaggtgtgtgggtctaagggtgccaggtgtgtgggtcgggtgagggctctgatttgaggtgacctcaccaggtaccagctgcgtgagtgattcttcaagccacccactgccatgggcctgttctctgctctggggatggagaggagggccaccgtttctctaaaaccctctcctacccggatgtgctgtggggagtccttcatcctctgccctgagatagccacggggaaaatcaaacaataaaaaccaggtcctgggaggctggagtgtcctctccaaagcaggagggcagatactgatcctgggtctctgaacgtgcagtgttcccaatgggatgccccctcctcctccagaaagtgtaggccacgggcaaaatgggcaaccccttcacagagtccactaaagccagttgccaattttggatcagaaacaagcccactgctgtgaagggcatggccagcacctgcccactgcaacccagtcaataagactaggaaccccaccaaaaaatagggaggcaatggggtcccctagactgtcaagagcaccccaacctctcactagtaaccagggaggtggtgcaaattaagatatcattagagcaaacaaggtaactccaagtgttgatgagggtgagggaagcagggcctcacacgtcactggtgtcactgaggaaggcagtgctgggtatctgccaaccttggcaatatgcacagcccaccagcctccgtcgtgcgtctaagcagattccctggagaaatgcaaggagcctaaagagacatgtacaaagatcttgattgcagggttatgaaatggttttaaaataaaataatttagatgttcatcaatgcgggaatgaacaagtgcaacattgtatatgtatacatgaactattacacagcctttaacaaattcgcgctgacaaacttcactagacacgtgtgtatcaacagggattaattgaaaagacatggtagaggaaaaatgccagttgtagaataatttgaataacagcttatgatttatgtaaaacaagtgctatctataagtccgttacttaaatttctgggagaaggcaaagcagcttcaccctctgggtgaaccctggaaagggggagggtgggaaccacgatggagaggagtggcaacttcttctgtgatttttattgaagagaatatggtcttgcgtaagttctgtttcctctagtgattgaatactactttctaaattgaaaattatatcacaggcactttgctgagtaattagaaattcttccaaaccatgatttctaatgaatgcacggtaaatagatttgctatcagttatggagtttttcttctttcttctaaataaccctaaataaccttctaactttcttctaaatagccctaaatagatggttcatgtgcaaagttttgcctatacagtactttgtgctctttcctcgggagaaatttctggaagtagaattattaatgcaaagagtgtgggcattttaagactctcaatacctattggcaaattgcttcacataaaagttgaaaggtctgtccttaagtcctgctgcatcttttacacattgagcagaacttttatcctttttattgaaaaaatctttgtgaacttgacagatgagaaaaatgccgtctcggagctattttatttccatttttattgttagtgacaatgaactcctatgttgggtcatccgtcgtttttcctttaatttaaaataactgtctgcctgaaatcccagccagtcaggaggctgaggcaggaaaattgcttgaaccggagaggtggaggttgcagtgagctgagattgtgccactgcactccagcctgggtgacagagaaagactccatctcaaaaataaaataaaataaaataaaataaaataaaataaaataaaataaaataaaataaaataaaataaaaactgtctgaatctaaagaaacgcagcagctacctaaattttgtctaggtttttggttttggtttttatatgtaatttgaagtttgaggtaaaatacaaatgtgaggtttttccacaaaattttcccacaccatcaaggagatgctgggcccacggatcattggaagaccaggttttaggtcttgctgtcaactttctttcattttttctacctttgactttggaatcagactaaggtgggtctgagagcaggacttacactgaccaggtctgtgccacacacagctgtgccgcagtgcctcccaccagtaggatggctgtgagattaatttatgtcatgagcatatatgatgtcttcagtgtgccctataattctgcattgctgtcattgtcattctgttgtgtatcctcaaaggggaaaactctttttgttgtgacagtgggtgatgccggcttgctctctgttgcaggctgcatgatcattgcaatgacccttccctagacgaccccatcccccaggagtatgcccttttcctctgtccaacggggcccctgctggaaaaacttcaagagttctggagagagagcaagcgccagtgtgcaaagaacagagctcatgaggtcttcccacacgtgacactctgtgacttcttcacggtgagtcaacccagtgtgccttcaatgctcacggcagctggaggcatttttctgtgctaactaggccatgatgggacaaagttgacttatttaaatgggatagtccagaactgcatcattagctggcaccttcatatgagctgtcctttattttcctctttgccttcatctggtcaactcctattaatccttcagaacccaactcatttatcctctcccctttttgagtcttctccagctccccaggcaaaaggagttgctgcccattttctcgttcatgtgtctagtggcacttttgtatcatacgggccatgtgtctggtgcagcaccgcatccctcaccagaccgagtccctcaagggaaggcagatacctcactcatctttgcacccccagaaactagcacagcccctaaaacagagtttgtgcttccaaaatgtgtggtaagtcaactcaaggatgggtgattgttggctacccacaaatgcagaacttttccctgtctcagggaccagccgtctgattcagaaaaaaaatggcccagtgggtagctccacagcaaaacacaatggcccagcaggcagctctacaggggcaccgggaagacaagaagaatgtgggagctgctcaggagaaaagaaggagaagggagagacagacagccactgctctactcagctccgccagaggggcttaaggaagggcacacccacttctgctaccgcggcctggccccaactctgctgttggcaaactgatttgttccacccatttcaaggaattccatcagggcccaaggaaccctccattccaacaccaggcccctcggtgctggatggaaaggaggaatgcaaacctctgaagggaaaagatttctggaagatgtcccaggagaagcagtaccttccaaagcctccaaccaccaccccggattgcccgagacttgcagggatccccagagcacaagactaaacctggaaaagccccagaaaaatcgagagagttttccccctacatcgacatcaatggtacttgtgacaagctgactcccttctggttcaccctctggagccaacggggaaaggcaaggcagcccaagccatgtgacacagctcagaaatcagagcaggccttggccccccactccttccccagcccactgaggtgcaagcacacacacacacacacagatagacacagagacacacacatagctcacacacatagacacacacagattgacacagagacttacacatgcacacagatacacacacatacatgcatacagacatacatagatatagacacacagacacacacagatagacacagagacgtacacacggcacacacagatacacacacatacatgcatacagacatacatagatatagacacacagacacacacagacatggagacgtacacacggcacacacagatacacacacatacatgcatacagacacacacagagacacagatacacacagacacacacagatagacacagagacgtacacagcacacacagatacacacacatacctgcatacagacatacatagatatagacacacagacacacacatatatacatgcatacatggatacagacatacacagacacacacagatagacacacatacacactacatgtacataggtacacatgcaaacagatacacacagatatacacacacaggaatacacagatacatgcacatagacacacacagacacacacagagacacacattagatagacacacatgcacaaacacagacatgcacatacatgcacatacatagacaaatgcacacatacagacacacacataagcaccacatgcacacatatgcacacagatacacacatgcatacacacagacacacatatagacatacgcagacacacagacacacatagacatacgcatatgcagacacacacacagacacacacacatatagacatatgcagacacaaacacactcacacacctccctctgtcgttagctcctcccagtcccccaccccagttctggcctggccgtggttagtggagctcccctcacaggcagaagagtgtaacggagactcactgtgtaccttgatgctgtaaaatgaaaacactaatcttccgaagtgtgatattgatcacagctacacttataacatgactattcttgaaaattacatatctgaggccaagaaacacaatgtgagacggattcaggaatggacatgtgttcactgggtggttttgtgttgagtgccgttgagggttgcagagaaaacagacagggaggaatgtcaggccggcctgtccatggggagacggaagctgcattaaacactgtgatctggcctcatacttgggcttgtaagaagcactgtgggaaattccgagggcagcccggtgctgggaagagaagggatcaggccaactcccgccaggagggtgtggtgtctgggtttcccctgtggtccgatgtggccaatggcactgggaaggttttcaagcccaggaagcagcctccccagggcggtaggcaacaccgagcccagatgtcaggagaggctgcgtctggctggaggatgggggtgggagccccgtgggcaaggctgtcgggccagcacctgtcgggctccgtgggcctgagggattctccaggtgacagagagcctgcggcctcaggggtgggagctgcatcagaaagagggtcctgcagccactcagggggcatcagggaggccgggccaggggctgtgcaggctcaggtcctccagggagcagaccccaaggcagaattcccagtgcaggagacgcacaggggagagactgctggtgaaggcaaaagaggaggagagggttggaggcaggcagagcctcagtgccttagaggagtccctgtggaacccgactcagtgctcagccgtggaagagagggtggccccgcagctggaagtgcagctgagtcccgctcactacaggctctgagcagtgcctgggcagccttggagtctgctagaaacctccagaagccaaatcatgcaaacctgagcaaagcagtgtgccatgggactgaggaaagggcctggcaggtgatgagcacgtgccatggagggaggggatgcagttcaacgaccaggggatttccaacctgggcacctaaaggagactccaacctgcaaagaaacttacctgaaatatttgaaaaaaccgaggtccaggtatagaacaaatccataaccccagacacaaagggacgcaataaattatgttacagcgctttgaacagaaaagaatctcactttaattgctgcctgattgttattaattaaattaatagatgacttctgatgagaggtgtggaaacacaggctctgtctctgtccccttagtgtgaagaccagaaggtggaatgcctgtacgaggcgctgaagagagctggagacaggctcctgggctccttccccacggccgtgcctctggctctccactcctccatcagctacctcggcttcttcgtcagtggcagccccgcagacgtcatccgggaattcgccatgaccttcgccacggaagcatctctcttagcaggtgggcagccctggccagttgcaaacacagggctggattcacagtgagtgagccctctgtggcagggactagcccccggcacatggatgcagtgggtgggttccaggggagcagagcccagcagcaatggtgggatggctgggtgggctttcttccgggctcagtggctgcacctgtcctcacccaggcacttccgtttcccgcttctggattttcagccaggtgcctggacatggccctaacctgaggctgagcaatttaactagagcctccttcgtgagccactacatccttcaaaaatgtaagccattagaaagcttccggaccagctttggtcttctctttaggcgggaatagccttgttctcattatgtggtttttaaaatgcttagctatatgccaacagcctgggaaagtgccccagaagggtgtgccaagcatcaagcctgagtgggtgactgtgacggggttggaggctggtgcacacagggagtcagggcctccccaccccagccttgagtgggagacacacaagtcctacgtgacttatttctgtattttcagtatgagcttagtgctctctccttggcctctccagggaaagattatttagactcatattcagaatcatcaaaattcccttctctccaaacaccagccctggcctggagaccaaggctaccattggggtttagtggaaaggattgtggacttgacgtcagaagatgtgatttttttctgtgtccctgatgagtggcatgaccttaatcaagtcatgtccactctctctgtctctttttctttctctacaaaacaatgagggctctcactcttcaagaacaatgttgcctgagtctgtggcccatcctgccatagttcccgggacacagaaggcactcagtattgctgagatttgccgactctaaaatctgacgaggccgcagtgccttggtgggagggctccccactttctctctctgggagcgtgtctgtctgtgctcagacatgtatgaagcacagatcctggcctgtaaatccatccctgaatcctgggcttccacttggatggcagcttgtgagtctggagatcgaatctgctgaataattagaaagtcgcccccggtctttgtggattagtatcctttatcaaatgatggctctttcacacccaggccctcccccagtgaacctcattggcagcatcttaaaaacaggaagactgaggctgcaaagggtgaagggcctgcccaaggtcctgtggtgtgtagagcggtgtcccctaaaaatgtttgtccaccaggaacttgggaatgtgacctcacttgggaatagggcctgtgcagatgcgattggttgggaggaggtcacactgcattagggtgggttcccgtaagggtagaggccgcacagagacacagagaagccatgtgccgactgaggcagagactggagtgatgtagccacaagccaagggacgcctggggccaccggaaactggaagaagccaggaaggacccttcccaggagctttcggggagagcacagccctgccaacaccttgattttgaacctctagtctccagaaatgggaggcaatacatttctgttgtttgaaaccaatctagtcccctaaccaggctggcggagcagggacctgaacccacctctgtcctgctccatgctgcctgggttcatgctgggcagccccacttcctgtgggagccagcgttgacctcacatctacgccccgaccctaagcaggctgtgtcctgcccttccatggcccatgctctcagcctgacaccgagggggtggaggggactctctcagtgatgagtgaccagtcactgctctgaagtggccgaggtccctcttggggcaaatgcatgaggcccccttgcccgcgttggtcctccccagtgaaacgtgcccataggcacaggtccgcagagagaaggaaacgcaaggacccgttcagaagtcggtgtgactcactctgacgtcagcaacctgcagtgggtctttcccaggccacactcactcgcatggcaaggcggtcctccccgactgctaaaaacaaaagtcaggaaaggaatttccccaccacctacacactcatgctgctccccaccacctacacactcatgctgctctgggctgtgcagcctcagtgccccagctttcctagagaccgtgggagcttcccatttgcctctaaaggctcacctctcacgtgggagacagcagtgagccccaacttcggggctccagggaaaggcttgcatcaaccttgaccttttttagggggtgagcagatcctgtttgtaagtgccctgccgtggagtgggggcagggtacgtctgtgcaccgacacggcgtctctagcaggaaactttaggttaggaggctgatttcccactgcagccttggcgagcaggcgctgccgtcctccagcagatgctgctgaagcagaaattgggcaggcccagaggctcagtcaaggtcaccctgcaaaagggggcaaagtgcagcctaaaactaggtctatctgacaccaaagtttgtgttgttcccgtcaagacacagaccgcctccctaggacataaaatactttgtggctcaactgaaatcagatcctggctgctttggtgatgccagctgctctgctcagactgacctgagagcccctggcaggaccagggagggctagggccacaggggcagaggacacccaaaaagacctgaggctcaaccactcccaggacttcctgcttcaccaaaacaaggtgaaccttaaagacactgtgtgttttatagttttgttgcctaaagagttttcttcttgaaactctacgattaaacaaaaagccgttgaactggagctcgggcctgcaagtccaggccactgggtaacgtgcacaccccggggaatggaggagccgtttactctgtgcatctgaatcgtgcattcgggcagctagcctgcaaaccgataggcccccgagaccctgaacccacatctccatatcgtcctctttcctacttcctggaaaaatctacagggatccagccatctcctttatgatgtgagttctgagcgggccaaatgagctctgagttctgagagcccttgccttgtggaggaagcatggaggtcggaggaaggagacatttaggtaacggtgtcctggcaccctctgtgtttccctgatttcacagactgctccgtgaagccttgcaccaaacagctgcatctgaccttggcccacaagttctacccccaccaccagaggacgctggagcagctggccagagccatccccctgggccacagctgccagtggaccgcagcactctactcccgagacatgcgctttgtgcactaccaggtgagagagctgagcaggggctcataagaagcagatgaatgggctgggctcggtggctcacgcctgtaatcccagcactttgggaggccgaggcggcggatcatgaggtcaggagatggagaccatcctggctaacatggtgaaacctcgtctctactaaaaatacaaaaaattagccaggcacggcggcgggcacctgtagtcccagctactcaggaggctgaggcaggagaatggagtgaacccgggaggcggagcttgcagcgagtggaggtagcatcactgcactccagcctgggctacagagcgagacgtctcaaaaaaagaagcagatgagtgaacggccactcacctgacagcatgtaccccctggagccctccaagggagatatgttagtagcaaggaaaatttctattgcttctctaaagccattctctttcttgtgcaatttacaaccagcattcttttatatgtgagttagagatgcacagacaacaaaatagaagcatttccaatattagaaaaggaagctgggtgtggtggctcacacctataatcccagcactttgggaggctgaggcaggtggatcacttcaggtcaggtgttcgagaccagcctgggcaacagggcaaaacgctgtctctactaaaaatacagaaaattagccgggcgtgatggcacgaacctgtaatcccagctactcgggaggctgaggcagaagaatcacttgaacctgggaggtggaggttgcagtgagcagagatcgtaccgttgcactccagcctgggcaacagagcgagactggcaaaaaaaaaaaaaaaaaaaaaaaagacagaaaggaaaggactattgtaaagatctatgaatacatgttttgcttattaattcttttttatttatttattttttaaatgtaggggccatgctaatcttctctgcagcattccaattttagttatatgtgctgccaaagtgagcacaattcactttaaagaatgatttgagtgaaacctcattctgggacttcctgcccatgaatcgatgggtttagaaacgaagtgtgtgatgctcctttcagacccagagagcacgtgtgaatgaatccaccatgttctgtatcgtatgaggtgtcaataacctcacaccgaggaaggcggatgtgaaagtctgcttatgccttcagatcttttgtagacaaaaaagtacctagatggatggatgatggatagatcccaaaatgtatctcttttttttttctttttttcttttttttttttttttttttttgagagggagtctcaccctgtcacccagggtagaatgcagtggagtgatctgcgcccacttcaaccttcgcctcccaggttcaagtgattctcctgcctcaagcttcccaagtagctgggactacaggcacccgccaccatgtccagctaatttttgtattttcagtagagacggggtttcaccatattggccaggctggtctcaaactcctgaccttgtgatccacccacctcggccttccaaagtgctgggattacaggcgtgagccaccgcgcctggccccaaaatgtatttctaaatctatccaaagaattctatgctgcgtttcattacattctgtgctatatattgccagacaaagctttggatggagtcttggagacacagaacacattggaggggcagaaagcaggaggtggcaggtgataggcctcctattgctgccattttccaatgtaaatctttgctcgagacgtgaaacccctttgcctcttttctagaccctgagagccctattccagtacaaaccccagaacgtggatgagctgacgctaagtcctggtgactacatctttgtggaccccacgcagcaggacgaagccagcgagggctgggtgattgggatctcacagcggacgggctgccggggcttcctgccggaaaactacacggatcgagccagtgagtctgacacgtgggtgaagcacaggtgagtgctgcctctggctgcagccccgtcatctctctctgagttactgtgtgagagtgcccacctgccaacagtgtgcttctagaccattccattattggtaaaattgcattctgtatgctgacaaaattattcctgcaggtatatagtaaacatcttggttcgtccctggttttctgatgataacattcaaaaaagaatgaattactctgcattagagtaatttgagatggtaatccccaaattactgcaaaatactacttctttatcacacacataataaattatactcagaggtcctgagcttgggtttatttattcttctgctccgtgtatgaaatgtaaagtcctaggtcgtattattagttttctatgactgtataataaattaccactaaaacaaagtgcaattattatcttatggtatttatgggttgagagtcagagtccagcttcactgggtcctcagctcggggtctcaaggctgtaatcaaggtgcctgccagggctgggctccccactgaggcttcacaccctcgcctgagcatacacagttgttggtgggagtgatttccttgaagctgtagggctcctggtgagttgcttcttcatcagctgaagaatctcttaattttagcaccttttagcatcatctggtgaggctaaggattttcagaatcatcagatactggttcttttttgttcgatgttcttccctcaatttatctctttcctctcccgcttcactataaataacatgaagaaaccaggtgatacacttaacactttgtttggaaatagccttagctatgtgaccaacatcatcgcttacaagtcctgctctccatggacaatttcattaaactctctggcacacatgggaaggatcctccttgctccgatttcctggaacacctgtcacattcctttctgagttctccccggaggattcacctttagcatccctatttcctctagcagtctgttcatggtgatttgggctttctctgctgtgctactcaaaagtctcttagcctctactcgctgccaagtcccaaagttgtttccacattttaagttcagaaggtttccaacttacaatggtttggcttaggatttcataatgttacgaaagtgatatgggttcaatagaaactgtacttcaagtgcccatacaatcattctgtgctacattttcagtacaacattcaacgaattacatgagatactcaacacttgattataaaatcggctttgtgttagattattccgccctatcataggctactgtaagtgttctgagcgtgtttaaggtaagctaggccaagctgtgatgttcagtaggttaggtgcattaaatgcattttcaatttatgatgggtttgttggaacataaccccatctgaagttgaagaacatccactgtttgttagagtagcaccccattcctgataccaaatttagtaaaagtttaaccagagatgcagaaccagtcactttcatacaatatataatacatataagtatatgtacagttgtcccttgctatctgcaagggattggttcccggacccccacagatacccaaatcctcatgttctcgagtccccgatataaaatgctgtagtatttacatgcaacttatgcacatcaccctgtatcctttaaatcatctctagattacttgtgatatgtaatacagtataaatactatgcaaatagttgttatacggtattgttttttatttgtattttttaaattgtattgctattttttaattgattaatcttttgaatatttttggcctgcagttggttgaatccacaaatgcagaacctccagatacaaagggctgactatacatacatagtattttatattatatacacatgtatcacacacatatatatatggaaaggtatatatgtatacacacatctatattgatttactacaatgaattgccttatggaattactggggctagctaagcaagggcagacaggcaggaagggaggagcctacttaggctgaaaacccatgggcaagctgaagcttgttgtccacatgtggcagttggaaggaccacccgggtgatgggagagcagtcacagacacagctgctattgaagtctctgagtgtgaggaaagcctaagtttttaaaaaaaaatgccttccaactgcataagtcagacctgctcagaataaccttgcttttgattaatttaagctcaactgattaggggttctagtcacatttgtaaaatctccttccagcagcacctagactagcatttgatgggatagctaggaaggctgtgtgtgatgcttaggatggctactgcctcccttccatcctccagctctcatgagaatgcctcttgtagcccaccctgatcagacatgtgctaaaaaggaagtctaggaactgtcgttcagtctggccaagttgccacaccataaagccattgcaaagtgttaaggtggctcttgtgagctttttcactctcttctcccaggttccagttaggagagtggagagagcaggcagaggtcagagtacacatggtgaaaaaagagaaaagctgctcagcctcatgggtgtgcctgttggggtggagctcttgcaggtgtcaagactgatggttggaacaactgaatgatgagagtgggaggagaagggcagaaatacacagaaaaaccctatgttgtggttctgggcttcctggcaccttcagagctgtgtggctggggaagagagcctggaaaaacaccatcgtggccatccctctgtctccaggcaggaggtcttaaaaccattttatatttcactcatttgtttaattctctcctaaaatgctccacagcttctctagggttcccctcaccaccctgacaaataaataaatcattaagttgaacacagatgtatcagcatctactcaatctatagattttcagatctgtgctggacatttgctgtggacttctatttccagcatctatacatccagggaattattttctgtacccttcctaatgagattcatgcacatggcaaaactatgaaaattgtgacgttttatttgagtagtcattaaaagctgcttaaaaattgtcagaggctatatggataagcctctgtgtggataagactagcattttaagtaaattaagaaagaacgtattttgaagagctgaaataaatgattgcatattggtcatttttatccaaacccccaaaaaagaaaagaaaagatggtttaatagtacctgatagaagctcttggtgaaatgattagaatttgcaagaaatagtagtaaaaataatggaagtattgtctgaaatatttataaaaggagatttggtgactatggctgatttctttaagtattatatttctttttgctaattattcatacactgagatttgtataacaagccagggacagtacctatgtccctgggctcccccactaaacataatagccacttgacattcaaggagagcagattccagccaaagccccacagctgtgcatacatgacattccatatcatcttctcttgaggccatttaacttcttaccctaatgaataagaacttaggaccacaaaatgcaaatgtgggatgaaaaatgcagccgtagtcacacgtctttatttattgatgtgttgactcctaatccacttaaatctattttaaggcagcttaagagatgtccaatagctttgcacactaacatcaccccctgtgcctggctctgtgccatgcatttcccttactaactgatttacttctccaataccccctggataggcacttttattgatccattttatagttgatgaaactgagacacaaagagatcaactcacttgcctgtgttcacacagcaagtgagcagaggaagccggattccagtcttatacctaatcccacgcttgggctttcaactatgacctcaactgcctatagaagagatcattaaaatttaaaaataagtccataaattaaattatgacacatccatacaataaaatatttgcagctttaaaataattaaaagggagaattttatatattgatttgaaaaaatatgcaagatttattgataaatgaaaaaaataagttgcagaacgatgtgtatggcatgatatacttgtgggggaaggggagagaaacacataactgtctgtaaatacatgtgcacaatatgtatttctatacatgtgtatgcctaaaggttccctggaagggagagtgtctagaaacttctaaccatggttaccggtgggtgttgggagtgggagccaggagaatggaacagaaatgggagggagtcttttcaaacacgaccatttcataatgtttaaatgtatgaagcatataaatgcattacttactcaaaacataaattaatccattttaaatttcaagaagagaatgtaagaaagctgggtcaaagggagagtaaaggtggaaaagctagacaaagccagggctgaggtttgtccataccatggcgtgcgctgtgagctcccagctccgagctttcccacatccagtgagaaaacagacacacattcaaccaacagtcatggccatcccagatgcgtgcagaccagcggttcaggagaaacacaatttgctgacatagacatgtccgtgggtccaggggccacatcaaaatcacaggatgtgggtgccacaagggattgtagagataaccgaaggcagctcccctgcttgagaggtgagaagactcgggcccaggaggccaggtgacgttgtacaatcaaggaagctcttgctttcttgcaagctcagttcaccacctgatccaatcaacagtttaaggaatagagaggagatgctggctatgccctaactaaccatctcaatttcaggagggttggggctcccctgtggccccgcatcatttagcatgtccttcgctctctgcccgggatgggagagtttcacagtcacagaggaaccacaaagactctgcagaagatgagtcagcggctatgatacttttcacttcacaattaatacatcagacacctgccatcaacataaccattccagcttttatgcctgacatttctgggactattctttccagaggaactttctcttgagaattaatcagtattaacaaaaattgcaatgaaaggaaagagaaataagcactgggctaggtgctgtgggttgtctgattggtcctgctttggaagcaccctcattgtggctgggggagcatcaagacaccctgacaagctgtgatctgtgcttatgggccagtgaggcagatgacgggagctgttggactccactgtgctggctaaatcttttcaaactgctgaaaatccttattaaacatctaaagctttcaaaatcggaaaatgatccttgaatgtctccacacatcactgacatattcattagtggaaaatggggtcagacagcaatgtccagaggccagctgacccacggactgacagatagctgtgcagatgttgaataattacttcctacgagccctggtcaggactcacacttgcacgatccaagcagcagaaccactggcattagagtgcctggaaacagacctgcaggcgcaccaggaggaatccccctgcccgccacagagggcacctttccaggtaagagtctgcagctctgatgaatagtacttgtcaattaacacaccagtcacccatcaccactataatgaccccagcctcagcctccgtgccagacggtgcagggattctttggacttatctaccgcaaaatcacactgtaatgtttgtccattgctttgaagatcagagatggcctggagagactggtgatggaggaccgtattcacaaaccacagcagcttccaatcctctgtccaggagagcagaggggagcacccctgtgggacaaacaacaggggggcttgagtgtgagggctcgggagaataagtgccatcccccagtcaagatgaggactttcccaacactgaagacagacacagcagattacttcaaaaacctcagagcaagtttacagcaaatatctcagacataagaaaggtacaattaagggctaaattgcattctgccaacattcatatgtggaggtcctgacccctaacacctcagaatgtgaacttatttggagacagggtctttaaagaggtgactaagttcaaatgagggcattagagtgggccctgatccaatatgtctggtgtccttataagaagaaatgaggacacagacacacacagagggacagcctgtgaggaaacgaggagaagtacctgtctacaagccaaggagagaggcctcaagagagaccagcctcaatggtggcttgacctcagactcgcagcctccaggactatgagggcatctgtggctgtcgttgaagccgctcagctgtgggactttgttatggccgccccaggaaatgaacacagggacgtagtgatgcaacccccagatggcagctatgtccttttaagaaccagggagaattcaaacacatctgtttcatggtgtaagttactgtcaagaggctctcttaagtcaaagagaaaaatggaaatgtgaaaatgctaagctcttttctttctccttccgtcacccatgttcacagcataatcttgattgtatttcatttgaaagactagcaaaatgcactccgtttctctctgtaaacctcacagatgtcatcagttgatagcaaagccctactgtctgcagagcgagccgcagggaggctgtgggtgccctcgccttgccctcaggaaggggaaaccaaccaatatttcctgtgctaatgtggggctatgaattgtgcctcactgctctgagcatgttaatttgaagaggaaactgtcgattgttccaatgagactatctatattcttggtctacttaggatcaactcaagtgtgcatttcctatctaatggcatctgacagcttgagaagatgcaaagtaaattggcctggacctgccatagtttatagatggagacagggcaggtaatagtgtgagaagatcatgtgtaacgcagatgctgagatgcagaagaaaagatgcccttcctggctctggacgggtctcggtggaggagtgggagctactgctggttttatgagaatgtggggacttgagacctctatgggagaaatgcaaacatttgcaaatgggctggataaatagaaacatgccctgtgcatggctgagaacagtaaactgtggtggtgtgtcagttcctcccagagtggatcaaaggggatggtgtattagtcagggttccccacagacagagacagagacaaagacagagagacagagagtgaccgagagagaaagagagagagagatctagttgaaggaattggttcaagactgtgagcctggcaagtgcacaatttgcagggcaggctggcagatgggagaccctgggaagagttgaggttacagctcaagtccaaaggtggtctggaggcaggatttccccttcctcatgggaccccagttcgtttcctcttaaggccttcaactggttggatgagacccactcacagtgatgtgtcgagacattcaaggaccattttctgatttaaaaagctttaaatgtttttaataaggactttcagctatttaaaaagattgagccagcaccatggagtccaacagccccatcatctgaagggtggtctctgctttactcagcctagtgacttaaatgttaatctcattctaaaaaaataccttcacagtgacatctaaaataacatttgacccaatacctgggtactgtggcctagccacgttgacatgtaaaattacccatcatagacggtgatcattgtaataaaacaaacacatcatccacacttcctgagtcctgagcactttgcacacgctacttcattttgtgctcatgggaacctttctgctgaggttgtcccggacattctcaagtacatacatgaccagatgctgggtctccatggcaacaacatggtctcacttctgttcaagccgtgctttccttcccctgcaggatgtacaccttcagtctagccacagacctgaactccagaaaggatggtgaagccagcagcagatgcagcggggaatttcttccacaaacggcaaggagtcttagcagcttacaggccttgcaggtaatagaacattcccttttttcttttaagtaaactaagcaaaactacactttgtattaacttcacggtggacacagcttcgtaggtgtagcttttgttccatagacacatcctccctgccctagagcgtggtcagcaagggggcctcccaggtctgagggtgccgggggtcctgccctggtctgtctgctctgggcagacagggagccaccccttcatggcagagtgccccaccttgagctcctcaaggcagctgaatcccgagttctcatcccattccctcattcatgagccaagaggtccccaagacgtcacctgccccggtgccttggcccctcatcttttgaggcaaaactctccataacctgggggtcagcagactcaggccagggtccagggcacagcagggcaccccgagctggccaccctcatggggcacatccaggagtgcaggctgccaggcagggacaccaaggagcaggcagcccctccctgaacgcaaacaagtgacatcacatccctgatccctgtcctgtgatctgaagcttcacactccttacagaggagccctcaggaaggggctgtacctgctgctggcctttgtctggttgccacagtagtgaaaatgcctctctgtccttgttcttcccaaattcgtccgcctgtgccctgccatgtgccgcacacgttactttaggatctctcatccttgctatccccaatcgacacaggaggcgctattcctgccccctacccattttacagatctgaaaactggggctcatggaggctaggaagcttgtcggagagcacacagactcctaaccaccctcccatcagattgttggaaggattatgtgagatgggccatccagtgcccaccacggccaggcccctggtgcggagaaactattgtgcccagagggtggggtcacagtagccaggcttattccctagtccccagggcccatcctggtgcctggtccataaatctccagaacaaccaaaggaaggctctgccgggacttgtcagtggctcaccctaaggtcaacgctcaccctctgttacggattgaattgtgtgcctccaaaattcctatctcgaagtcctaacccccagtctcactgaatgtgattgtatttgtagacaaggcctttaaagaggtatttaaggttaaatgaggcaacacaggtgatgcaatctgatccaatctgactgctgcccttataagaagaggggatgaggaaacagacacacaagagggatggccctgtgaggacacagggaggggacaccaccggcaagccccagagagaggcctcaaaaggaaccagccctggcaacaccatcatctctgacctccagcctccaggactgtgggagagtaaacttctgctgtggaagctaaacagtcaacccacacgcagcgtccctgtcgccatttgcacctcctggcagctggtgcaaatcagcccaaagctaagtggccttggcaggtctttgcagccttggtggctaggtgaggaggccttttcttgagaaatcaagaatgtgtctctgaagctgggtccatgagaaatggcgatcagcgttcaccatgtgagaaaggcccagacttgggagagccgagactccccagggctgtggcctggggattatttaaaaagctttaaatgtttttaataaggactttcagctatttaaaaagattgagctagtaccatggattccaacaaccctatcatctggagtaaaacagagaccattctgttttactcagcctagtgacttaaatgttaatctcatttttaaaaaataccttcacagtgacatctaaaataacatttgacccaatacctgggtactgtggagaagtacccaggtattgggtagggggagagcctggaatggaagtctctgctcgtagctcagcctgtgtctaaaccgtgctttcaatggctgaaaacagaacatgcatctgcctgtgaactggcccccctcacacggtcttctctatagggatttcaccccttccctacagtaagaaaagacaactggccacaggtctggtagaatcatggccccagagatgatgccctaatcccgggaacttgtgcatgtgaccttattaggaaagagagtttctgcagatgggattgagtggagggtcttgaaatgaggaaatgatcctgggtcatccaggagggccctaaaccccatcacaagtgtgctgatgagagaaaagcagaggggatctgatacagcagcagaggaggccatgcagccagagaggcagagactggagcaatgtggccacaagccaaggaacacctggggccaccaggagctggaagaagcaaagaataaattctcccctagaatgtcagagggagcatggccctgccaacaccttgactttggacttccagcctccagagctgtgagagaataaatgtctcttgcttggcaccgcccagcctgttatggcagccccaggacaccaatgcagcaccttctgtctagagaattggtgcagccctgcctcattccatagatcccaggggtcagtccattccactccccacagggctttcttttgctttatcatcatattcctgtggcaaagctccacagaagaacatttaaaatgctctgagctcttccaggaagaaaataccccaaatccaaaacttcagcccgcaagttgaaaacttcagggactttgttactaggcagaatgagtttccaagagcatgcatgctttgcaatctacttgcagatcagctctctacagctctctaggatgttttaatattcattctgggataggggcggtgggtgctgcctcttggtgtcagtgtaggcaacctctgcataaccacacttcacatgcaagagagcaagacagcaagacaaaccttcccctgaagctgttccccaggagatgcatgtttctatcctgaaacaaacaactgaagttttccaataagggaaagcaatactattcacttggccttaccgtatatccgttttgaagactcagcccagtgaccctaagaaagtgtttgcatggtgactgcaaacgttctcactggctcaccaatcccatagtttatgcacctaccaaatgtagccagggccaccgagaactgtctggtcctgataaatttcagcagctggaaattctgcatcgtccgggccagcgtggacttcacaagggatccacaggatctggcaggagctgcccgtggtgctgaccccgagaatgctttcaaggcaggtgaaattggcccccaccctactttctggtgtcccttccttcccagtagtttccaatcacttccctaggtacagggacaccacgggggaccactcttgccagagcgagtggccagttagtgcagacccttgagactggatcactgttcacagaagaaagtccagacaggaatgatcagctgcactggccaggtggaaaatgagtcccttcctccctgagggtgtttggatgttaaagccatttgcattttcctctctaggatttggagggaatcagggcgatgctggggctggtgtatgagggtttatgcagacaaggcttacctctcctcacctctcttccttaccctgctcagtaggaaaacacacacaagagctgccctctcattttagcccagagagagctgtgtggccaagagggagcagggcagggatagtgcctgtctgagctgcctcctgcccaggggtcctccctaccccgtccatccctggtcgcctgggctccaggcaggatttggtccccagaaggccccacagcccacctcccgtggcaggccgtgttcgctctgcccccaccatctctgttaatgactcatctttccatgttcatcccttggcccagggagacctgcagctccctaaagcagggatgctgtggactgcagcttcatggaccagcatgtgacatgctcccccctgcggtgccatgtcacagggaggttgaggcatgagtcctgggtgccagagggcagcaccactgggcctgtgttgctgcagggttccccacctcttgctctgaaatggacccccctggatagcctgggcctggctctggggctgggaatgtaggtgaagggccgatgtcagctggcacattagtgccctccagggaagcagccgagcctggtgtctccctccagggtcctggtgcagggcttatgctccacgcagctgtcctggtggcctctagctggctcggcccctagcactctgctctctggtcccagggggggcatcctcagctctcattcactctcttcatctcatttgctgtgggttcctctcaaggccagtccctcaacttgatcagccctgcacagcatggggagaagggtggcctagcccctgaggacagagccccccacaacaccatcccacacagtggaggcccctcccaaagggtagccagcctcgctgccccaagcatgacctttgggctacttccccaaagcacaggctccccagaaagagggcgggcgtgagccctgtaactgcaaggctccaaggccatcctgcggctgcctgaggctggggaggaaggtgccagagagctgctgtccctggctcgaagctgctggccaccgccaaggccagtctcatgccgagaagaagtaaataaactataaagtactgttttcctttagcattcagccaaacagagaatgaccagctatgggaaaacagcaaggggatggatgagggcttctccccttggtgctcagaagcagaattcatacctgggagccataaaaggacggcccctcaacaggtcaacaccagggcagtcctggagggtttctcagaagaagtgtgccagcaagagaggagactagatatatagataggtaatctatactataacaatacatattataatatagatagggataatgtcctaagacgtctctatgggaatgataaggacttagaaaagacagaaaagtagaaaaacggatgtgtcatgataggggccaatcctgtctcttttcattttcttgatgttagaatgcccagaaaataaaacattggaagaaattgaagagattgtcaatttcatgtcctctttcattctaatgatttgggcaaaatgggctgagctattgactaacgaaggaaaagattccctcgcagttgctgggtgactgggagagctgccattggtgcaagtccagtgagttggatgttaaactgcatgtgccttgcttcctgccccaccccccaggctaccgttgcaaggaagagcgtgctggtggttcgccacggggagagagtggatcagatcttcgggaaggcatggctgcagcaatgctccactcctgatggtaggtcacactcaggcgggtctacggacagaaacactgtagatctaaccaatgagatctccttcttaatgaccttacatggcaccagatcccctgaggcaccattctgtagaatgaccatgtgtagactgtatgtgtggaaaacgtgcctgctacatcttcctccaggggtgttccatgtatgcatttgagtgtctgtgttggaacctctccaacctaatcttaactgatgtaatttttggctatgctgcttaacagatggacgtattcttgaacatgcctcttgcacaccccagcttttctcctctgaatgccaggaagtaagaatagtgcttataaatacacatacccacaagccaacctctgtattgatgatcaatgtccacatcaatgctaatctcctaataggaagcctgtagtgtcacaatttctaagccatgacccattacataaattaaggcattgaatgtagtgacaaaatcaattcacagttgctaggttagccgaacccttttgggatccccctccagaagcccagcagacccaagaaagtggtaaatgagtagggaaaaccattggcagatgacaatcacacaccagaaaagattctgagcagataacatcatgatcaagcatatttccaagaactcacagagctaataatatggtcacctctataaaacaagatcaagtaaagatacaagagcttaaagcaacaataagacaataggtggctatcaggatgcattaacaaacatataagaaactttttttcaataaaacagtttttttagctattgaattactgaagctatagattgaactgacacaccttgtccatggtggggagaaccaatacaaaacaatcaacaccaaaaatagttattgaacttcatagaaaaagaaaaaatatttggtcatctggacaaaagatcaagtcacttataagggaaaatattttaaaggcactggaaatccccatctgaaaggaaactcctggtggatcttttcccaaggtagagaggcccttgataaagtgaagaattacatctagtttgtctgaattttgtatattgcagggtttaataaatcacaaggaggtatagccacgtcctcccccaaggtgaccaacctcagggaacacaagggagatttggggggctctactggcctctccccagctcagctcacttttggcccaggcacccacatcctcacagggcccctcacctcaccccatattccacacagactctgctcccatcaggacctgaccttgccccacatccttgtcctctcctgagctctgccctctgcccccagagtgatcacagctgaagtgtcaatgacagcaaaatacctaaatggagtgtcttgacattttagagggggatcacagatgcctttgagaacacaatgaaattgatggactttctctctgattttaaaactgcctttcccaagagctaatgttggcattgaataaacacctctaaaatgcagtgttcaaacaagagtctctgcccatggaaatcccagggagggagtcttcagaaaactcctatatggaaactaaaatgcaggcatgaaaaattgccccccgctgacccctgctgccccccactgccccctgactctgggtttgtgcaaggctgtgggccaggatgaaggggcctggcatattctggggtgcaaagggcagggcctgctatgtatggcagagcaggtctcaggaaggtcagtgtggctgctggaacctcctaataaccaggaggcttggggtccctttggagaatgtgaaggcaaaccagagtgcactggagggagcagtgtgtcgtggtgtcctgtgtgaggataatcagtcatcctgacgtggtgacatgagaccagtgccccgactcgttgaccactccctcttgagtcagactctgggctatgggtgttacctcactgacacctcgcaatcgctactctttccctgttttttactgataagagagatgaagtcatttatttctggctgcacagtgaggagatggtgatgccaggatttgctaccagactgtcagatcttagaactcaaggtcaaactccacgtgaaccctggcaccgggcagcctctggtgggagacagtcccagtgagcccacttccagcctggcttcaagcaattgactaaagaatgcacaacacaggcatctccagctcaagcactctgtcccctgagcaagaaggatacgtttaaagctagggggatggatcattgatgccaacttcagattcttaccgagttacactaaactagtcatagagacactttatcaggttcttcatcaggaaaatgtaagagtgaatcttcatggggcattttgggaggacaaagagggttgcatagttcctggggctgaaacctaagttgtctgcatttgagaaaatgttgtgtgcacagctgagcagcactttcttctcaaattgaagccacgttgcagagaatgttcagaaacaacacagttgacaataatttcaataataacattgctgttagagtgggtcttggtcttgggagttttgtggaacaaatctgtactaacttgatgaaactgaacgtctgatgcttatttatacttcagggaaatactacaggccagacctgaatttcccctgcagtctgccaagacggagtcgtgggatcaaagactttgaaaacgatcccccattatcatcgtgtggcattttccagtccagaattgcaggtatgtttgaggactgtctagtaggaaaggtaacaataacagcaacactgattatggctagcaggcatccagcctgagccctagctacacaccctttgatacagtgttagctttgtctccagtctgctgaggaggctggggcacagagaggttaagcaacttgcccaaggtcacacagcaagaaagtggcaatgtagaggtttgatctaggaatggatgattcaggaagttggcaggaatgaaagaaaggcatggaaagaacaagagaggggaggaaaaatcaacaaccaaggagctccaaggagctcacttttcaaatggaaaaccacatcctctcattcgttggttttatttcaaaatctgtcactttgggcttttgtttcatgtctggcggttctgcttctacgtgactgagtttatgtaaacagaagagaccattgagttcatcgagtcttcatttcctaaattcagaaaatggaatccagagaagcaagttacaccaatggttaactgcagagacccccacggcccactcgcccagggccccactcagaggtgtgctcagaaatgtttacccacctgctccaggcagggtgggaagtccgagttatagagttatagagttagttatagagttatagagtcatggagttatagagttagttatagagttagaatcatagagttatagagtcatagagttatagagttagagttatggagttatagagttatagagttgttatagagttatagaattatagagttagttatagagttatagagtcatagatttatagagttatagagttagttatagagttatagagtcatagatttatagagttatagagttagttatagagttatagagtcatagatttatagagttatagagttagttatagagttatagagtcatagagttgtagagttatagagttatagagttatggagccatagagttatagagtcatagagttatagagttagttatagagttatagagtcatagaattatagagttagttatagagttatagagtcatagagttatagagttatagagtcataaaattatagagttagagttacagagtcatagatttatagagttaattatagagttagagtcatagagttatagagttatagagtcatagtgttacagagttatagagttaattatagagttatagagctatagagtcatagagttatagagttagttatagagttatagagctatagagtcatagagttatagaattagagttatagagttataaagtcatagagtcatagagttatagagttagttatagagctatagagttagagtcatagagttatagcacttgctgagtgcagtggtgagaatactgcactccccgacaactgattccagactcccagtgtgagctcccaggacactgagtcgggaggagatggtggtcccaggcctctgtccctggcttgcaggtgacattttctgtcttcctcttctcttctctgcatgtctctgtgcacagatttccccttttagaagggcactgtcacactggattagagcccaccctaatttaattgattgaggtgcatacccttattttaacttatcactctgtaaaaatcctgtttccaaatgagtcacattctaaggcaccaagggtgaggactctaacatgtttttcaagggaggggatacagttcaacccagaagagcctccactgaaacctcgctcatcagctttcaggctgtgcaatttttgtgctgtagggactcccatatttccctgagagcagggcttccagtatcacagggggaaaggcagagtacaggcttttccttccacgagcttcagtgggtcttgagttttctcaaacgaccacaaatgtgaagccccgcccatttctgagctcacagtggtgcagatccaaagcccaggcccacgaggctgcttctctgctgaaggtcttaaagcctgaagtcaaggtctctgctgggctgagttttcattgggagctcaagtctccttccagactcattctgctgttggccaaattcagatccttgcagtgggaggactgaggtctgttccttgctggctgttagctgggggctgctcccagccctagtagaggctgcccacattccttgccatgtggtcccctccatctttgcagccagcaatggagaatgttttgctgaatccttctcacttcacacttctctgacttttttccatgactggctggagataatcactgcttttaatgggctcaccaacttgtcagccccaccttggatcccttcccttctgccataggatgtaattgtcccaggagcaacagatcattctggtcatgggttccacccatacttggaggctgtgcagggtgtgtcacaccagggggtggaaacccggggccctttgaggaccctgcctaccacagggagcacatggctcatctgccatcagaggctagaattatgaaggggcattttctgcctttttcactattttccaggggacgcgctactggacagtggtatcagaatcagctctgtgtttgcctccccagccctccgctgtgtgcagacggccaaactcatcctggaaggtcagtgagaacctcggtgagcctctcctactgccttgaccttggggctattctccaaggggagtgggaagggagtggaggtggaattggatgactggcaatgaatgcccacaccaaagtcatcaggcaagtacgagccagccctccaaggatgctggcaggcatgctgggtccgtgagcgtgtctggaataccaggaccgtcagaccagtaggggctggtgtagctaaatgccagggcctgtcctcataccgtttctctttggcctccgtcagctaggcatttttaaaatacacctggaaagcggcattcgaaaaccttgagagctgggaactgctacggttccttgtaagtctgaattgcatgacccttcccagggcaatgcactgggccagtggagctgtccagcgtcctcaagggctgatgtgtgtcaggaagtcctgggcagacccttctgcagctcccatctacgggaagaagaaagttcctgcccataggagagcagcttgttccagaggcctgggctctgccttcagcctgaaccctgtcctgctcctctttgtctgggaagagggataagatctcggtccccaggcagggactggccgtggccaggagcatgggtgacatgcgagagagcatgtcgcctccatggtgacaagggagagggcagagcacacagacacagatgcagcaggagggcaaatgtgggggacagggcttgcctcgactttctcagagacctaggaagtaaggccaccagcggaaagtgggggcagggactgtgggaagtttggggtgcgccgaaggaatgaatggctgtcaggcagaggggcccaggacatgggctgggagatgcagagtgaccgctgggcagcactcagagcccacccacagttcatgagcatgagtttaaatggagatgcatcagccgggctagggggtctcttccagcttagaccgggagtaggtggagagtgggatgcaggtaagggcagggttgagctgtgagtacggtggagccagaggggacaggaagacttgagggcatagtgagggggtgaccgtgcccatggactttcagctgggtcagcgaggaggccgagcacgggggaggtgagtgcaggagaaaggaggtgatctgagtgaggctcaaggtccacgagggggctgcttggagacagcagagtttggcactgcaccatggcggggctgcagtggctagaatgacaagtcccaggtggaaggaatggatgctcaaggcagggaggaagccacgtcctgcaggaggtgggcaggaatggaggggccatggaggagccatcccgcagatggtggtcttgctgggacttgcacatggggccacatcagagccggggccacgaggggccgggaccttcacaggaggagccgttgggacagcagtggattcaatgcacacatgtgcattgccggttcccatgtcctcagatccccttcgccccgtcagagacgctccctcagagcaccttcaaatccaggtgcccaggaagccccagccaggagcggacctggttccaccccggagcctctcaggctcatcattcctgtcctgtgctctcatgaactttccatcccatagtccagtcctagtttcacgaggcacagaaatccattgtatcagcatggagcatccacgatccaccttccacacacttaaaaatgtcaagacactttctgcccacctcagtcttgcagcttcatcctttcatttcccacccaactgtggcacaggaccccacccctctgcacggcatctcgggtcacaagacagaaatgcagacttacttcactttgccttggaggttcccatgttgattgcatcacggcacctctgggctctcaatgagccagatgaagatcaaagaacaatatcagcttctttgaccaaaccacgaaaggactcgcgaatccccaaaggcctgacggcagtgtagccggaggccagaggcagctccacccgagggcaagcaaggcttccacaatccttgtctctcctcacaacgctggcatgcacatacacagcacacacatccacacacaccacacacacaccacacgccacacacacactacacacacccacacacacaccatgcacacccacacaccacacacacccacacacaccacacacacccacacacactacacatacacaccacacaccacacacacaccacacaccacacacaccacctacacccacacacacccacacacaacacacaacacacacaccacacacataacatacaacacgctgaacacacataccacacacacaccacacacctcacacacaccacacacatacacacaccacacacacgacacacaccacacatccacacacacaccacaccccacacacacccacacaccacacacacaacacacacccacacacacaccacacacaccacatacaccccttggggtttcacttgggggctgagtcacagaccgcagaggaggaggctgtgatctttgagagccatgaccccagcccaggtgacagggtcccgcgatgtccgcctctccctgttcccatgctcacagcagcaggtccagccttcgtgttttcaggaaggcctgagaaacaggacgtggcctttccagctctgcgctttgggagggacgagggtggcaagatcagaaatgtgaaggggcagggtctccgagtatctggggacccttcagtgtgagggtggctcttaataactatgatggaataaagcaaaattgatatatagcaatttcatccctggttgtttaggatcaatgtatttataattaaccaaacacctataatcataagatgtgaaccaagcaagaaatgcacacaaatatatgacaagaggggaacaggcctgtgcctcagtttcccctcttctcccctgtcgctggtctttgcaccccaccactcaatgagcgcattttgttggaaaccacctaagatgctgctgttcttccactaagtttcagaatcactttggtttctgccactggctggccgcccactagcaggccgtgcgagagtccccaggtcgcctgtgcctgccaggccagcaacaacagtctcctctcactggggcttttactgcctcagcctgcaagtttcccttctagtgaaaaccttcgtctttctttccctacccaacctctctcaccacgataacaacaacgaataaaaaaggaatctcttggccagcctttgtaataaaagaatacgactgactgaaaacacttcataattttatcttttttttgtcattgttcgtggttcctcattaacacacttattcccatttttggtggatttttttacttctattatttgggtcacttgcatataaaaagctttcaaaaatgtcttttgccagcaataatgtcaaaatctttaatgtgatctctcagtgacctttaagtgcagatgatgatgatggtgatgatgatggtgatgatgcctgtttaaagggcatgggtttataaatcctctgttaattcagaaaaacaaggacacccagtcttctttacaaggcctcagacatgatcaacctgcttatcagatggtgtctgagatgctaaggtgctcaactttgtttaaattcaatgtcagagaatgtccacatgaaccatttcacagccaagtccacaaaacactggcctgcaagaggtcttcaaaggaaagagacccatggccacacctgtctgggaagctctcacactgttccttcatcttatttgttcacaatggaaatgagctcttcacaggcttgggggagatttcgggggcctggtttatcagggaggacttgggggcccagttgatgggggaggactcggggacctggttgatggaggaggacttgggggcctggttgatgaaggaggactcgggggcctggttgatgggggaggactcaggggcctggttgatggaggaggactcgggggcctggttggatgggggaggactcgggagcctggttgatgggggaggactcgggggcctggttgatgggggaggacttggaggtctggttgatgaaggaggacttgggggcctggttgattggggagaacttgggggcctgattaacttgctttaactctcttttctaagcatgcttgatgaaagagctccttccatggacctaaaacacatttgaggaactgattttatgtccagcatttgagttcaatgacatcttctccattcccagtgaaaacattcaggtctttttttccactcaaaaagagatggccttactttatggctcttcctttaatcaaaatataaaatgcttgggaaatgtgagttgcagggagtcagaatattccagaagatggctccttccattcttcacctcttgccccgtctgtgtaagtgtttatcaggaaagtgcctcatgaggccaacattcttcatgatgggtcacatcttgtccattgatcattggatctgccatgttggaggatgcagccggtgggctggtttcacggtggagctgtgctgggtgatcaggtgagccccagcctaagcctgctgcctgggacactcaccagctcctggaagactctggcccttcctggcacacagggggccatcactcctctgataccttcccactgctcgtcagttttgacttcagaaatagcacagctatgcctaatcacagaacggtatttgccaagaagaaaatcacactgtttaaaaggcatgatttagacgtgtgtgtgacggtctgagatctaaaaggagacttatttatgcaaagtcagggtggatgttgaggatgataaacacttgtattctgttgaatccagaactcaaactggagaaaaaaatcaagatacgagtggaacctggaatctttgaatggacaaaatgggaagctggcaaaaccaccccaaccctcatgagcctggaagagctgaaagaggcaaatttcaacattgacactgattacaggtatgctgttctaaagttctctgccactggggcttttccagttattgttaaagaaaaatttcatgacactgttaaaatggtaagaaagactttattcaagagggaccactgcagtggggttttgcagcaggggagagaggtggggctcaactcctaatacaaggaaaagaggggagttatagccacagagcagggtgggggtcagtggatggaaaattcctgagaaggtgggtcattcttgctaaactgacctaaatggagactcttgctgaaggcaggccaaggtgatcagacatcacctggggggtggtagaggataaggaacttgatcagatgtcgaaggtaggaggttcttgctaaactcactctgcaagaacagacacagaagcccaagggtcaagacctcattgagaagaaggttcagaggagctggactggagtttagtcaaggagagagtctttgtcattctccacccatgtctgactctgccatcacagagccctcctggtgttgagtaagaatgtgtgctggagattgactgtcagtgctttgccagttttcagcacaaaactggagcctgcctgttgaccatgagcctgccttgaggcagagccatcctggaagaacgttctccttccccagctaactgcagctgagccttcctaatccctacgaaagtgccagggcagcagcctctccttctcatccttccaggcccgcgtttcccctgtccgccctcatgccggccgagagctaccaggagtacatggacaggtgcacggcgagcatggtgcaaatcgtcaacacctgtccacaggacagtaagtgcctcaccatcctcagtatgaacagcccctggggcttggggaattatctctgagatggaaattggccaattttctgaacctatgaatgcccctacttctcctgcctgcccccgcccccattctccagcaacaaagttttcatcactgctgctgctgctgcagtaaccgggtgcacagacacacactcccctgccgcccaggccctgggaccccccatcctgggactgagtgctgatgggaggggaatgatctctgagatggaaattggccgattttctgaacctatgaatgcccccacttcccctgcccgccccccaccattctccagcaacaaagttttcatcactgctgctgctggtgcagtaaccgggtgcacagacacacactcccctgccgcccaggccttggaaccccccatcctgggactgaatgctgatgggacccaggccagcagggtcagcacaatccacccatgtccaagggatttgagtcagcttcctgggaaacaaaagagacagagagagaaagaacaaccaacttccaggtggcgcccccttccctgacccatcacacgggtctcctaaccctcccgtgttgctttgtcctggatgaagcatgcacagaagcgctgacttcccacgccttcccctgagctggcagggacaagcgtgtctcctgagggagacccactcggcctgtggtctccaggtgttcttatctaaagcaggagtcgtagcaggctcgtgtgacaaaataaccggctgacctttctaaagtgaatcaggtctggcttgggcgtcagccaccgctacatcccagtctgtggctgacggggcccaggcagccagcgaccacagggggtggctcagctcacttcctaggcctccctgaggctggtgggcagctgctgcgtgcagaggaatccatgagcgagggtgggacgcaggcatcactgagcggttaccagccacactacttctagcccaggggtctcgccaggcttcggggcactctgagatagctctgccccccaccactttggggaccccagtctaataaaaggtgctctctggggctgctttgacctggaggtgttcttgttttccacagcgggtgtcatcctaattgtgagtcacggctccactctggactcctgcacgcggccactgctcgggctgccgccccgggaatgtggggattttgcccaactcgtgagaaaggtacgcgcccactcttggctctttgggccacaaaatcaagcatcccgaagacacaggtttatctcatccacttctcggaatgaaaacaagtgtccggctgacccagggccaccaggatccacgtgcccccggagactgtgcccaccggctcttatgcgaagggtgacttcgggctggggctggtggataggtcagtcaacctcatcatcattggccacttgccaactttttaccagtcagctcatgccatgaccccttgcagctctcgtagaaaaacagacggtccaggaaggagtaagcagtttagatgaggagggaagaaacgactgtgggactcgattctggcctcttctggggacctggggcagggcggctgatggatgaaaaggagccccttgatcctcttgcccttggagtcacccagcatggaagaagcttgagctggttgtagctgccagagtgctcaggctctggcaagggccttgtgaatgacaaacagaggataacgcacacgtgacatcttggacaaccttgattatcactcagcaaagccagagggtgatgtccagtccatgggtgaattgaggcaggcaaactcaggagtgcagatcccaccccagtcccagcccttccctgcagatctactcaaggctggactcaccacagtcctgacctttttatgaaattcatcagtccactggtcagtgcccaggcagcacgtgcagcatagacaatgcctgtcatcggaggtgcttgaggccctgacctggtttcttcacatagcactgccacaggaccacactggccacagcttgtttgccataagttgtgggcagcagtgggggttgctgagtccccccaagaggtcaggggcttcagaggagcccaactcccgggcccagcccagtgacaccagccaggtgcctgcaggagggcttagctctctagctacgcctgcctcagcagccagatgagaggttacgcacatgaagagcatgcctgccgtgggtcattgtcactcagcaattaggcatcagacacccgaatctccctttcttgctccattttcctctgcacctgagtagaaacatgcttcccctgcaaaatgtctccagggtggtgtgtcccaattatgatccagacatttccgagcgccctggattcttgagccaccaggtgagcattgtccaaatagggcagctcaacccccctgggccacactggtagaggtctgcatggattttcctggggactgtccggggcagccccggcaccacctgctcccaaaatgttgctcttgcttctgcaaatgggtctcccacacatgcgctctgatgcattcctcctgtccctgccccgcttcccacagtcccatatacacataccaagcctccagccccaggcgctcctggggatccacgtaaccaagggtggcagcactgcacacaccagctgctgacagttcctcaaacccatgagcctttgtggccaaagctccacccactccttggacccttcacccccttccatagatgccaatcttgaacttccaaactcctggactttcttatgctggtcacgtggcgttcaccctgcccctaccccaaaataagctggacttgctcatgcatatcagaaaatacaaagggggggctctaccaaatgatgggcccccaaatcagggcagctggaaagggagcactcaggaccctccccgaccagcccatcaccgcccctcgcccacagcctctacaagcgtgaggaaagaatcaccctagggtcaacaccagcctcactcagacccccctgccagttggcatttttgtaaatttcatctgcctgaggaatttctagacattagaaagaggaaggaaagaaagaaaagaaaagacaaaaacaaaaaaggcttcaccacaaagctctgttctcacacatccatttcacagatgaagggatggaggtctaaaggttcactttgtgcttttcttttgggtctgaaaactcaatgtctgtgtctttttgtgatgctgaatatgagaatatgagtcactccttaagtggtggatggcaatctccacctcagcctgcagacctttgtggtgggggctgttctactcattgtaggatgtaccaccttgtaggacctctacctgctaggtgtcggcagcacctccatcctcagttgtgacaatcagaaatgtctccggaattacccagtgtcccctggctaggggacatcccccacggggcaccgccagggcagatgttggtgccattcaatggtggcagtgccagcctgggcagtcgcagaccctccaaagtagaggtgtgcctgacagttggctttggagctagtctgaaattgatggacttgctataagatattaacaagtgatttaaaactctgttccagatcccttccctgggcatgtgcttctgtgaagaaaataaagaggaaggaaaatgggagttggtgaacccaccggtgaagaccctgacccacggggcgaacgcagcatttaactggaggaactggatctcaggcaactgagagccacggtgatgttgtcataacctcagagtggagaggcagaaaccatgtgcagaggctgggagatgctgctgtttccagaggcgtcttagtctcacccaatgtgatttgtagaagcacgagacgcacttttatatcccggaatatttccctccggctttcgcctttgtaactcccatctgtggacccatcgtccaccagcccagctgcggggagcacagggcaggtggctgggtgaggatgccgccctgcagcatgtacaccgagtgtctgcagctggggacacaactgcccgggactctaacttccaggaattaaagactcaccacacacgaaggatctaaccacttcattttccatggtctaatcattaaattcccaatcgttttttctttttctgggtccatcactctttagccatatccacatgggctaaaacaggtgtaatagtcaataaaatggtcccagaaaaccatcgaccaggtcaaaactgggttgctgctccgtgctgtcaacattcatgttactatgtctctgtggttgctgtaaccaatgaccacaaacctgggggtcatggaaagaacacaaactttacacacacacacacacacacacacacacaggcacatacacacatgcacatatgcatacaaagacaggcacacacgagcatgcacacacacaaacacgtgcacatacacatgcgcacacacatgcacacgcacatgcacacacacgcaggtacacaagcatgcaaacacacatacacatacaaacgcgtgcatgcatacatgcacacatgagcacacaaacacatgcacacacttgcacacatgcacacaaaggcatacacatgcaatgcacacacacaaacacacatgcacacacaggcacacacacgctcacatgcacacacacacacgctgactctcctacggttctggaggttggcattttctcagcaggctatgtttcttctggagcctccaggggaggatccttgccttttctcacttttagaggccacctgcatcctccctcctcaagtacagcggcgtagcagcctccaagctctctcagtctctgccttcacagccacatcgccttctgcttctgactctcctgcctccctcctacaagggcccttgtgttgacactgggcccacccaataacccaggatcaattctcatctcaagagccttaaccacacatgcaaagtcccttttgccacataaagttgcatattcccaggtcccggggattaggacatgaacatctttgggggttatcctgtagcctgccataacataccccaatccttccaagcacagcggagctgcccgtacagggcctcggacatagggatttgagacactccccttgcaggccttttttggcttctcctattcttgtttctgatcacgtagaggagagaagaggactttgccagtgggagaagtaggctcccccgatttaatggggccccaaaagaagggccacgagcaaagtggagtctgtccatgatggtgatgctgaggaagctggtccagcaggggatggggtctccccagtggggagtctcatgccccagcccacaggtcacacctgctcccacagcccacacatgtggtgcctcatgctgcaggcagagatcccagcacggtgtagtgacagtccatcggtctttcatctcttctagccccctgatccagtgcaggtgttatttcatgattgcagtttggggctgtggtggtggctctgtgagtgccttttatagtgtgaatgcagagacagggcaggaaggacccatgctgcaccctcagcctcccctgtgagcacccaggcaagtggagggcagaacacaaagggagctcttgtagaaataaagatggtgaacaccccgggctgtgacaaaaacggcccacattgtgtagaatgcacaggaggccagacccaataaaagtttccttgctgttttagtcaatcaaacacgacctcctgagaaaaagacgcatctgtctgtcccttgttttatttcactaatgatgtagtttttctgtgtccaaacataaagaagtttgaagttgacacagccacagagagcagagcatgcaccccactcacaggcctgcttcgagtccaggccataccgaaatgacgtcttcagggagattgttctagacgcatcccagcagataccgactagagaagagatggattcactgggatgtaggtggctgggcagtacgtcctgcaacaaatacaccccaccgctgggcacctgggtggttgttctttctcctcggcaagtgtgtggttgggtccaagtccctcctggataccacagtgccacgctcgctaatcatgatgatgaattaaagtgctgcaagtcaaggtatggcattgaaatcacagtcacgtgttcaggtggtctgtaatgaatctctggattcaccttctcaggggtgaagcttccaggtcctccaccctgggcaaagccagacacaggtaattcccctctcatcctgctgggctgctcacaggttttgcaaggagaatgagatgggtttgaaactcagatctccagatctccagatctagtgtgcaagaaatagcattttctcgatattctatgcttctggttctgtcagaccctcattccacccccaaggcagaggaccccagttcagtggttctgttcctccagaaggaaccattcgctgtatggactgagccttgcggacagagctgggctggaaaagggcagagacggaaatgcctggtgggattatcatgattgggtgtaaactgtctactctatgaaccaataggaaatcccaaaaaaagaaaacaaaagacactcttttttccttcctctccctgggtgggtcgctttggtgtttgtgagccaagtctgacccctgctgacaccgtctggaagtggacgtcctgtcaccaacgccatcccaacccatgccccacccacattctcttgttgacttcctcactgtgtgcttgaaaaaaaaaacaagcctgggccaggcatggtgactcatgcctgtaatcctggcactttgggaggccaaggcgggcagatcacgaggccaggagatcgacaccaccctggccaacatggtgaaaccccgtctctactacaatacaaaaacgtagccaggcgtggtggcgcatacctgtagttccagctactcaggaggctgaggcaggggaatcgcttgaaccagggaggcggaggttggagcaagccgagatcgcgccactgcactccagcctggcgacagagcaagactccgtctcaaaaaaaaaaaaaaagaaaaagaaaaaaacaagcctgaaagggaattctaccagcgttccctgaggctgagcggatgacaatgttgttttgcagcttaatgttcccctccgagacctggttctttggaaagatggaaagtggtgagaagggggcggagccggcctcaagctgggcagccaagggggccaaaggcctaagccagtgcctgtctccaggctgcagcctgtggtgctgaagagcttaaggacaggcctgggaccaccaagccaagcactggccctggcaaacactgctgcactcgtctaagaagaaagagctatcataaccgtccaccaaagtacatcttattttagaaccaaatttgagacttttttaaacgtgattcatattggtgcatattatgggctgagttgaatgctccctcccccacccaaattcaaccagccaacaattctgcaaggatcagaagtcggaagaaaggaaaatggcagcatcgaatgcacagccacaaatcccaagaaggccccaggagcctgggagtggctgcggaggaatttagggctggatggcccacaggacatggtgagaaccactaccatgggctgaattgtgtccccctgaaaagctatgttggagactgatatggtttggttctgtgtccccacccaaatctcatgttgaattgtaatccccagtgttgggggagggaccctaaccctaaccctataaacatggtattttttatatcctcatatcctcataccatatttaaacctatggtaagcacctgctcttccacaggaacagcagataactggaaatcttagaggccttcccagaactggggttcatcagaacatgggtggctcctgacccatcactcccagacccagagcttatgcaccataggggagaggtggttcagaagggatgtgcaggacaactaaagtacagtaacatcgaggtcgcttgacctgagggcaggacctatggtaagtacctgcttttatgtaggtatatacagtaaagggagcagtcatagcagtgggggaaggaaggtgattaaataaatgacactgggacaactggatcacatttggggaaaagaaggttggaatcactcctcattcctcataccaaaaaaaaacatcaaagatttaaatatttaaaaaaaaagaaatcatgggccgggcgcagtggctcacgcctataatcccagcacttgggaggccaaggcaggtggatcacttgaggtcaggagttcgagaccagcctggccaatgtggtgaaaccctatctctactaaaaatacaaaaattagccaggcatggtggcaggcacctgtaatcccagctactcaggaggctgaggcaggagaatcacttgaacctgggaggcggaggttgcagtgggccgagatcacaccactgcactccagtctgggcggcagagtgagactccatctcaaaataaataaataaataaaaataaaaactatcatagagttaaaaagtaaaaggtaagctgggaaagctctgtgcttctcatgccgcccagttccagcccaccccctccaggaagccctcctggccgccagcccaccttgctgcccctgaatcccagctcaggcgtcctctgcacaattcatgtcagtcgtgtctgccttgtcctgttgttgcggtctctcatcgtcttgtctgtcactccttcccaggggttgcaatagtgaccgtgtgccgggcttccaggcagccccaagtccagtgggaccagtgacccccctgcaaagcttctctgctcctataggccaggatttcccagccttggcactattgacatttggggccagatacatctttgtcagaggacgccctgtgcattgtgggatgtccagcagcatccctggccctcccctactgaagcagcagtacgtccctcaccccagcccaccagttgtgataaacaaagatgtctccacatgctgccaaatgtccctgggggagcaggatcatccccagctgagaagtaccgatgtattcccttcacaggtctgcatggaaccctggcctcagggctcccaccagggcactcaggcatagcgcgaatgggcacaggtgtgttaggagtctggagtcgcacatgtgcactcctgctgagcagacagacctttatggagacgaaggttggaaaggaatcggtgcacatctcgagctgaacacttgtgtgatgctgctacggaggaagtccgagcagaactggaactttgcggacactgcccctggacgtaggtgtgggcctgggcagggggagccacgcggaggtgcgaccaagtcctgcacggacctcactgcctccgtgtgatgtggtggctgtgctgtgagggcagctgagccctgtgtccagcctcgtagtcctcttggctggccccacactcaaattctagaacatttaagtgcagtgcaccgtggacaccacgaggctccacactgttggactccagtcctttagcccagctgggagcagccctgacacaataattcttcaacagaggcttctccttaaccctgtctcatgcttctcctctcccctcatccccaaggccgacagatggtggctgcacacacattcaggagattgcaggaaataatttccaacagcaaatgagacattaattattcaatgcagataaacatcaacaacagcgcttcatccaaaggaattccactgggatccaggggctctgagttggagcccagttcggtcctctactcatggtgacctcagacacagtctctgtgtctcgggctcactgctgtaaaatcatgcggcctgtcgatgggtccatgtcacttgcagcatcttagtcctcattctggaggacacgtgccctcttagcagtgagccctggaggggctgactcgcagtgtctgctgtgttttccagtttccatgatgtaaatgcaccagggctgattctgggctgccagtgttttgacaattgatttgcagactgcgtgaaaatttaaaactcagctctcttgagctgatatgagccaccccagcccacccctgcagcaggcacgaacgttagtttgcagggagaggccagctgagctgctgcacagacctgctgggatcatcacagctgtgcgcttcaggccagtgcctcttcctgtaaaaggaaacaacattctctctacagaggatggaaggacagaagggctgaggcccatgtgcaggcggggtcaggagagagaggaggccaagtccctgggtctaggaaagacgggtgggtggagccaggccaggggcactaagtggaacgctgtctgctccctgcggagcactggacagacttttggttccagggattcatcccgagctgtgtctcttccgggatccttggccagcagcgactctggcacctggagcacacctgaagagagcccccaagctctcgcctctctccagccctgctatccaaccagatgttcccactcctgctcctccctgcctcatcgcctcagccgcccggggtgagccacctactctcccaaggcaagacacagccggcatgcttcacacactcaccttgaagttcagggttggaaggtcagtccatccagctgaagttcactgctagagatgtaattgaatcagccctggcaggagcatttggaccacaggaataggtaaacacggctgcgagtcagcccctccagggctcactgctaagagggcacatcgtgtcctccagaatgaggactaagatgctgcaagtgacgtggacccatcgacaggccacatgattttacaacggtgggcccgaggcacagagactctgtccgaggtcaccatgagtagaggacggaactgagctttaactcagatcccagtggaattccttcggatgaagcgctgctgttgtttatcagcattgaataactaatgtctcatttgctgttggaaattatttcctgcaatctcctgaatgtgtgtgcagccgctgtctgccggcgcgtggggggttcttcatgaaaagtgagaggggtccagctgtgtgaaaggcctttgcaaattgccacagcaaactcccagaattatgatgtacttcttcctgtgtggttccaagtaaatgccacttccggctgtccagtaccattttttcctaggacttaaggccacaaaaatggattaagaaacacacatgtatacatgcaatcttcctggtgaagtcttcaaacaaagttctccaagaagtcattaaaaaattaatcatctggaaatgtcatgtttctccttctctctccaaaatgtatttctttcaaccattaactcattctctttcattgtgtcccatagtgagacaaaactgtgttaggacaataaaccaagcaattttccaaagaagctatagcacgaaagcaacgtaaatcccgaaggagaaacgcctgcgaatgagctcaccgaaggcacactctcctcccaggagcctccccggagaggcagcccgtttatttgagttagtgattttggaagacacactgcactttctttgcctccagctttccttgagccattttgttctccttgcgaggtactgatagcacttattatctagaaaatataaccagactttgaggagaggcaaggggccctataaattatttatttttttgcttctcaaactctggaccgaggaccaggattacaggcattgcctggaagcttgttacaaatgcagggcctcaggcacccccgtctccgtgtcagcagctgtgtcttagcaggatccccagggcattgcctcacagtcagggtggtgcaaaagtcccgcctggcatcctggtgagtggaccaggagggggcaggtgaaggcaatattattggtccttcgactccagacaagaacttgcagcttagcctgaggaaagaaattagcccatatgatgaaacacaatctgatgacgtaaggatttttgtacttatgcccacatgtttagacatggcagcccgcatcctcttaaacctgaactttaacataccgtgacttagagccacaaacaacaaaacagagggcaggaaccagagttctccagagaaacagccagtgggaaacaggacccacatccatacggatacaaacatacagatacaggctgggagagggaaggagagaggggcattggctcacactcttacagaagctgagaagccccacgatctgcgggagctgttggcctcccgtctggaggccagtaggctcgagacccagagagaatcgatgttttcattcaagtccaatggcaggaaaaagccaatgcctcagttcaaaggccgtcagacatgaggagtttcctcttagccttttgttccattcagaccttcaactgattggatgaggcccacccaccctggggagggccgtttgcttgacagtctcctgattcgaatgttcgtctcattcagaaacctcctcacacacccccagagtgacactgggtcaaaacgtctttgcaccctgcagtccagtcaaattcacatgtgcaattgagcttcacattgggcatttctgccctggtaatgtcctcccattaccaaaaacctggtatttgtccttcttttcagtgggtttcacagcccagcagcagctggccctcttgtagagcagcagttcccagccttttggcaccagggacaagtgtcgtggaagaaaatttttccacaaaccagggtggggtgggggtggggaatggttttgagatgattcaagtgcaattacatttattgtgcacactttatttctattatcacgttgtaatatataataaaataattatacaactcaccataatgtagaatcagtgggagccctgagcttgttttcctgcaactagacagtcccatctgggggtgatgggagacagtgacagataatcaagcattagattctcataaggagctcacaacccagatccctcacatgcacagttcacagtagcgttcacagtcctatgagactaatgccaccactcatctgacaggaagcggagctcaggcagtaatgagagcaatggggagtggctgtagatacagacgaagcttcacttactcatccacccactgctcatctcctgttgtgcagcctggttcccaacaggggttggaggcctctgttacagaggaccctctcctgaccgccaatgagacccatgagctcaccgtcttgtctgcccttccacagcccacgctccctcctcagcccacgccccctcctcagcccacactccctcctcaggctcagcactgggaagagttcgtccttcctcacctcagccctcaagtgtggagtccggcgcctcagtcatccactcaacagacatttatgagggaatgcttgggtgccattaacactgctgggaaagcagcagtggatcagatacaagctcactctcaaagagcttatatttcagtggaaggtggtgagcaatggactaataagccagtgaacacgtaacacctcctctgccaatacgtgaggtgaagagaagacagcagagagggggacagaggcggaatacaaatgttatgttagcagtgaacaatcagtaagtaaaataaaaacatcacttatagtagcataaagaaaccagaagcaaaagaggatgtactgcatgattcaatttatatacaactatttagagacaaatccaatctgtggtgacagaaagcagcacatcagacgcttaatgctgggagtaggggaatggattgcaaatgggcacgaagatattttcaggctgacgggaatctgtgtgctgattgtagggtggtatattagtctgttctcacgctgctaataaagacatacctgagactggacaatttataaaggaaagaggtttaatggactcacagttccacatggctggggaggccttataattatggcagaagacgaaaggcacatcatacatggcagcaggcaagacagagaatgagagccaagcgaaagcagaagccccttataaaaatcatcagatcttgcaagcctcattcactaccacgagaacagtatggggaaaactgcccccacaattcacttatctcccaccaggtccctccccaacatgtgggaattatgggagctacaa

SEQ ID NO: 200 - DNA, 2487 bp, Homo sapiens
ggcgagcttcttggcctaagggcaggaagagatggcagcgggggagacgcagctctacgccaaggtctccaacaagctcaagagccgcagcagcccctcgctcctggagcccctcctggccatgggcttcccggtgcacaccgcgctgaaagcgttggcagccacggggaggaagacggcggaggaggccttggcctggctgcatgatcattgcaatgacccttccctagacgaccccatcccccaggagtatgcccttttcctctgtccaacggggcccctgctggaaaaacttcaagagttctggagagagagcaagcgccagtgtgcaaagaacagagctcatgaggtcttcccacacgtgacactctgtgacttcttcacgtgtgaagaccagaaggtggaatgcctgtacgaggcgctgaagagagctggagacaggctcctgggctccttccccacggccgtgcctctggctctccactcctccatcagctacctcggcttcttcgtcagtggcagccccgcagacgtcatccgggaattcgccatgaccttcgccacggaagcatctctcttagcaggcacttccgtttcccgcttctggattttcagccaggtgcctggacatggccctaacctgaggctgagcaatttaactagagcctccttcgtgagccactacatccttcaaaaatactgctccgtgaagccttgcaccaaacagctgcatctgaccttggcccacaagttctacccccaccaccagaggacgctggagcagctggccagagccatccccctgggccacagctgccagtggaccgcagcactctactcccgagacatgcgctttgtgcactaccagaccctgagagccctattccagtacaaaccccagaacgtggatgagctgacgctaagtcctggtgactacatctttgtggaccccacgcagcaggacgaagccagcgagggctgggtgattgggatctcacagcggacgggctgccggggcttcctgccggaaaactacacggatcgagccagtgagtctgacacgtgggtgaagcacaggatgtacaccttcagtctagccacagacctgaactccagaaaggatggtgaagccagcagcagatgcagcggggaatttcttccacaaacggcaaggagtcttagcagcttacaggccttgcaggctaccgttgcaaggaagagcgtgctggtggttcgccacggggagagagtggatcagatcttcgggaaggcatggctgcagcaatgctccactcctgatgggaaatactacaggccagacctgaatttcccctgcagtctgccaagacggagtcgtgggatcaaagactttgaaaacgatcccccattatcatcgtgtggcattttccagtccagaattgcaggggacgcgctactggacagtggtatcagaatcagctctgtgtttgcctccccagccctccgctgtgtgcagacggccaaactcatcctggaagaactcaaactggagaaaaaaatcaagatacgagtggaacctggaatctttgaatggacaaaatgggaagctggcaaaaccaccccaaccctcatgagcctggaagagctgaaagaggcaaatttcaacattgacactgattacaggcccgcgtttcccctgtccgccctcatgccggccgagagctaccaggagtacatggacaggtgcacggcgagcatggtgcaaatcgtcaacacctgtccacaggacacgggtgtcatcctaattgtgagtcacggctccactctggactcctgcacgcggccactgctcgggctgccgccccgggaatgtggggattttgcccaactcgtgagaaagatcccttccctgggcatgtgcttctgtgaagaaaataaagaggaaggaaaatgggagttggtgaacccaccggtgaagaccctgacccacggggcgaacgcagcatttaactggaggaactggatctcaggcaactgagagccacggtgatgttgtcataacctcagagtggagaggcagaaaccatgtgcagaggctgggagatgctgctgtttccagaggcgtcttagtctcacccaatgtgatttgtagaagcacgagacgcacttttatatcccggaatatttccctccggctttcgcctttgtaactcccatctgtggacccatcgtccaccagcccagctgcggggagcacagggcaggtggctgggtgaggatgccgccctgcagcatgtacaccgagtgtctgcagctggggacacaactgcccgggactctaacttccaggaattaaagactcaccacacacgaaggatctaaccacttcattttccatggtctaatcattaaattcccaatcgttttttctttttctgggtccatcactctttagccatatccacatgggctaaaacaggtgtaatagtcaataaaatggtcccagaa

SEQ ID NO: 201 - protein, 649 aa, Homo sapiens
MAAGETQLYAKVSNKLKSRSSPSLLEPLLAMGFPVHTALKAATGRKTAEEAWLHDHCNDPSLDDPIPQEYALFLCPTGPLLEKLQEFWRESKRQCAKNRAHEVFPHVTLCDFFTCEDQKVECLYEALKRAGDRLLGSFPTAVPLALHSSISYLGFFVSGSPADVIREFAMTFATEASLLAGTSVSRFWIFSQVPGHGPNLRLSNLTRASFVSHYILQKYCSVKPCTKQLHLTLAHKFYPHHQRTLEQLARAIPLGHSCQWTAAKRDMRFVHYQTLRALFQYKPQNVDELTLSPGDYIFVDPTQQDEASEGWVIGISQRTGCRGFLPENYTDRASESDTWVKHRMYTFSLATDLNSRKDGEASSRCSGEFLPQTARSLSSLQALQATVARKSVLVVRHGERVDQIFGKAWLQQCSTPDGKYYRPDLNFPCSLPRRSRGIKDFENDPPLSSCGIFQSRIAGDALLDSGIRISSVFDALRCVQTAKLIELKLEKKIKIRVEPGIFEWTKWEAGKTTPTLMSLEELKEANFNIDTDYRPAFPLSALMPAESYQEYMDRCTASMVQIVNTCPQDTGVILIVSHGSTLDSCWLLGLPPRECGDFAQLVRKIPSLGMCFCEENKEEGKWELVNPPVKTLTHGANAAFNWRNWISGN

SEQ ID NO: 202 - DNA, 25229 bp, Mus musculus
  misc_feature (1)...(25229): n = A,T,C or G
ggacccagaagtaaaacagaattctgaagaagaacgggacactgtcctggggggggggggggctggctaactcagctaggactttgcgggagctaagaaacgggagaagccacagtacaaaacaccagttttattacaaatatcaaacacccatagaacacccaaatgccagcctatgcctttggttaattgcaagctgcttgtcctttctctctgtacactttgggcgtttcttctcattctatcacaacgccacataaaccaggtttgtgtgtgcatgctgtgatacaagctcagcaccgggagggtggagaccggagatttagcagctcagtgttggtgtgaggtacctgaaaccccgtctaatagggagcgggtcggggaaacacattcgtggtaaattccgggtatctcctagagtttacattttctcatgtaacaagcacctccgctcctcaactgtctccgtgggtgtggtaatatctttgctcccaggttctctgtcacacagagtagaggacaggagggggacagcacgcagtgtgcagtccagaggccttgtcagtctgcaggagccgcaagagcctctaccatggcccggtagcaccctcctctcttcatgagctgcaggtgggtgccctgctcgccgacagagccttctctgagaaagaggatgtggtgggcctgctctgccaggctgagctgctgggtgataagaagaaccgtccgagaagcccgcttggggctctcatacaggagccgctggacctggagaaacacacagacattacagttcaggggacccctgtgcttccagggctgggacacattgtcgatatccctggtctgcagcacccctccaaacctatgacttgttaagatgtcctcacaagaggggggtacagagagagagagagcggaagcatgatgggggaggggactgaacagtctctcatctctacccataagctgggaaatttgaaaaggaaattattcttctcccatatattacatcccgactgctgttcccccctcctctcctcccagtccctcctactcaaccccctacctctcctcgattgcccttcagaaaaaagcaggcctcccaaggacaccaactgtcttgggagatggcatactaagtgaagtaagactagggtctcctcgtccagccttaatatgtggaaatttttttacgttccaaaaaacatatattaatttatgctttgagaatttcatatatgaatataatgaaatataaccataccacctcccgtttccctcctcttcccccccccacccaccccacatgtcacctttcctatgtcatacatatttttaataacccactaataagctgagaaaacattttgtaatttgtttttattttatgttcattgacgttttgcttgtgtgcaggtgtcagaaaccctggagctggagctgcagatggttgtgagctgccatgtgggtgctgagaattgaacccaggtcctctggaagagcagctaatgctcttaaaactaatgctattaactgctgagccacccctcagcccctaaaatgagaattttttatagtcaatctaaagaaatgtaatgcaggggctggagagtcagctcagcagttaagagcactggctgctcttccagcagaccagggcttgacttccagtacccacatagtggttcacaaccatccataacgccagttccaggggatccacaccttcttctgactttcagagacactgggcacatacatacattcaggctaaacactcatacacataaaataaattaatcttagtttaaaaaaaaaaagagtaagagtaacaaagagcacgagtgtttggatgatttgtgtctggacccaggctccactgctcaaaagctgtgtgacttttagaaggttaatcaacctctcctagcctctattttgtcatctacagaataagcacagcaaaagactctgatggacaaattagtacaaagggtgggatagaacgtctacgacacaaagcaagcttagcccatacagattgttaggacagtagccctgctcactggttcccgtgtccgggagaaaagctaatgggaccaagagttccaaggacaggtttgaacagttctgttgttggtataactaacacaggaggagtggcagaagcaaagctcccatgggaatgagacttcagggagatgacacagcagggtgacccagccctccagaggtagcagcaggaagactaccaagggtctgaggccagcattgtcttcaaagtgaggtccaggccagccaagatcacatagcaagatggctcaaaaagacaaagggtgagagccagaaccttacccgtagctggttgccagcatccagggcactggtggcatcatccaagataagcaggagtggcttccggatcaaggctcgggccaaggccactgcctgtcgctgacctcctgacagctggttcccagtctcacctacctctgcagagacaagagtccagctgagatgtagatagttgtgtacacatacacagcacacatacacactcatatacatacacagccacacacacatatatatactcacatacatacacacatacatacacaggcacacatatatatattcacatacatacatacacacatacatacacactcacataacacagacacatacatacacacatacatacacaggcacacacatacgtactcacataggcatatacacacacataaacatacattcacataggcacacatacctactcacacacttacacacatatacacagacacagacacacagactcactcaaatacacacacatacacactcacatacacagacacatacacactcacacatacacacatacacagacacacatacatacacactcacacaaacacatatagacatacagactcacatacacacatacacatgcatacatgtatacactctcatacacatacacactcacataaatacacacatacattccctcagggtatgatacacactcacatacacgggcacacatacacactctcatacacactcacatacacacacatacacactctctctcacacacacacacaagggcatgggcgcagctgacaggggcagtggaaatggaggccctatgaaggcagatggagtctgaggatgtgaatcttagagtttcaactacaaattgacatccaagggacaagagggattgaataataaaggcaggattgttggaatctggatgggagagtgcagatacctgtgtcatagccctgagggaacccagagatgaaatcgtgggctccagactccacggccacagctgtgatttcctccatggttggagtccggttcaggccatacgcaatattttctcgaaagcttcttccaaatagcagcggctcttgtcccactgcggccacctgaggtcaaatgtgaagagccacaggcaagaaacaccagtgttattgtccagggactgaagattcacaatcttgtgcataccatacagtcacgtgacttctgtccacagccccgactctgcccatggctgcctgcatcccctaactctctgcaagagttttcgtggagaattgtctcttggcttgatctcctcccctcccccacacctccttcttgctcacctgagtgtgcaggtaatggtgatcatactggaccaggcactggccatccagcagcagctggcccccggtgggctggtacaggttctgcagcagggcagccacggtgctcttccctgatccattgggtcccaccaacgctgtcaccgttccaggatgcagggtgaacgtcagcccctggaggccagagaagctcgtggcaaggaggaggaggaggagaaggagggagaggaggagaaggaagaagaagaagaagaagaagaagaagaagaagaagaagaagaagaagaagaagaagaagaagaagaagaagaaggaggcataaaagggatgggtagacagtacctgaagcacctggactttgggctggtttgggtaggcaaaagagacatcttggaactccacaaggcctttcatgtttgagggtgccaacgagccactgagtggagagcaaggagtccggtccaagtattcgaatattttctctgaggagcccacagccttctgcatggaggggtagagggagagcaggacctgcattgcagagcggggtgtgtgtgagcctgggatggaccacgaaagcaagtgagccgtctaacctgcttgacagcattcagggaacaggcggaggatgcgcaaagcggcagagaaggcaatggacaggctgagaccgccgactgcgggggcggggctcacctgaacagcctgggtgaactgaagctggtagagaacgaatgagacaaggttgccgctgctgacagcccctctgatcaccagctgcccgcccaggtacagaattcccaccttcagcagcattcccgagacctacagggaaaccatgggatgaaacgaactgcaatgatcacatggaaggtcttttctcccagacacgtgagattagggggaaggcggggtcaatggtcagactcaaacacagctcacatcttccatgtcctcctcctcatcgctgccggctccttgtttcaggagcatttgacactttttaaaaagatttatttttatagttctaaattatgtctgtgtgtctgtctgtctgtctgtctgtctgtctgcgggtacaggcatatgagtgtaggcacccacagaggtcagaagagggcatcagaacccctagagctacagccgcaggcagttgtgagctgcccttcataggtgctggtatctggaagagcagtctgcatccttaacagctgaaccatgtccagcctgtattacaaagctaaacacagcggctcacatcacgagcctctgtataggagattatgttattatgttatacctttcttgctgctgtttaatattacttttttactacatttgtttgtttgtttgtttgtttacttatttttgtatgtgagtaggcaccacagtgcaccttgtggaggtgagaggacaactttcaggagtcagttctcctgtcctccatatgggttcctgagatggatctcaggtcaccaggctcagcagcacgacagcaggcacctttacctactgagtcatctcactccccaataccctttaatgagacaagtctcacatcatagctcatgatggctggaaactcacagcaatcctcctgcctcagcatgagtcctgggattacagatgtgaaccaccacatcaggttttactcccatttttcaaatcagggcaacagcctcagaaaaaggtaacatgtgctggatacagaactggtgggtggcaggaaggatcctggaatctcggttacagctttagttccagctgcccctggccgctggcctctggcacttctcgtggctcccactagcttgcccacacagtgccaacatgaagcgcacaccgtgcaggaaatgtgtggctttctgagaagccaaggaagtgccggagttgggagagtggtatctccttaacacacaggtcaagtgggctttgtgtgccaatgtggaaggctgattcttaacactacaaaacactgagagaattaagggcagagtccttaattgagtaatcaagagccgaagccaatcacttcccactggaggaggagcaggggggttggaaaacagcagaatcaagacatgttcacacaaaggatgggatatccacctcctgtactcacactcgtggtccagacttcagccacgtaagccaaggcctccttcttgtttagagtcttcatttcttccaacttctgcctgaacttctgggcctcaccctcctcgttggcaaagctccgcacagtaggcatcgccgataaggcctcaagggccacctgcgtggactttgctagagactcctgcaccttcactgccagtgactatggaagacaaggaccagagacatcacacggggtgcaaatgagagagaatatggacacctaggttagctgcgtggagattatagagtcaagagtcagagggacagagggaagagaaaggtctacagccatacttctaggtagaaggggcgtggaggaaatgaatccagtttttgtaagatttattttatcgtgtatgtgtgtgcatcatgtgtatagatctccatggagaccagaagagggagtcagatcccctgaagctggaactacagaccacagagaactaactgcttagtgtgcactgggaatcaaactcaggtcctctgaggaacagtcagcactcttaaccccgagccgtctctccagcctgagagcctattctttaaggacagattgtggccagaagttagacaagaaggcagagtacagagatgcaggtgcagggcagtgcggggtcagaggtcacaggtcagaggttcaggatgatggaggactggaaagccacactgaaagcagtctaggagaaactaaatgtaggagctgaggatctggggacgtacctgatgcacttttcccagcttcttaggcaaaagaaaaagcaggggcaggttgatcagggtgaccagagtgaggtacggtgacccccaaaacatgaacaccaagagacacagggctcgccccaggtaccacagcagcaggctcagcgtgccactaatggactcgcacacgttggctgtgtcctcagtcacccgagatgtgatggaacctgcccagattgagaagagagacagtgagcaagcggttcacagagacaagaggagctgacagtgggggccagggtgggcccgtcagcacagcatcctgaggcgggtaacgggtaggagactggggaggcgcaggaacttcaatgcaggggaaaagaaaggaaagatctggttaggcctgtgcttgccagtaaaggagttgtcgctgggtgtggtggcacacacctttaatcccaacagactgggggcaaaggcagcaaaggccactctgggctacctagtgaattctaggccagccaaggctacacagtgatgccctgtaatgtgaagtgaacttccagttccctgaaagctttcagctcttcagttactttaactcctgtctgttgcctgccgctggccctccctccagtagccgtggagagaagggaggaagcaaccagagaggcaggcccagggtcctttaggaaatggagaccctcgggtctaacctcggtgcatctgcctaggtaggtttcagcgtctagtgtctaggattcagtttcctccatttaaaatgaggccgttggagttgagggtctctggctttccagggctgtaagtctgctgcttcatatggggaacaatgaatgcaaatacagttttccttagggtaaaaaagacaatgttttgctacatttgagatataccatgaataaggcttgggggtcactcagttgttagagcttttccctaacatacaggaagtcttggatatagagaaaggatctcatgtagcctagggtagccccagattgactatgtagctgaaagactttgaactttgacctctaggtcctgcctccatcccccaagtgttggaattaccacaccccatccatatggttctgaggatccagcctgggcatgtgtgtgtggacatgtttggggggggggggcagtcgagagcgtgtgtggcggtatagagattatagcatacaagtgaaaaggtttcatgagagacctgctgggttcttcaggaaaaaccctgtctcctggcgaaggacggcccgaaacacctctctgtgcacacggccgtgcatgtgtcccatggtgatgttgtagattccatcacttgcaaactccagcgctgtgctagagtcagagacacgggaggatcagttgtctccttcctgagacagagtcccagatccccacagaagtgtaacttaaatgacagtcccaacagccagtcccctctgctctgggacccccattcccatcctccacacctggctatggtgagaatggacatgagccatatgttgcgggtgaagctaggaactgtcttatcctgaagaatccagtcagtgatgcggcccgtgaagaagggaatggccatttcccctggggagagaggagagacacctcagtcacaaacattatgagcaaactacccgcaacttctgcccctctcccttcaccactatccaggaagctgagctcccagacccaagcctgttcacagacccaagcctgctcggctacatcaaacttctcaagggctacttgagggcggttagcagaccttgggggcacaggctgttaatcccagcactccaagtagaagcgagcagatctctctgggtttgagaccaacctgggctacataatgaattccagaagagccaaagctacaaagaaagaccctatctcaaaaaggaaagaatagaaaagaggggaagggggaggggaggggaggggaggggaggggaggggaggggaggggaggggaggggaggggaggggaggggaggggagaggagaggagaggaggggaggggaggggaggggagaggagaggagaggaggggaggggagaggagaggagaggaggggagaggagaggagaggagaggagaggagaggagaggaagaggagaggagaagatggcggtgtggaaagaaaccttcacatttgggctatgatgtgaagttctgctcccagaagaccctgtccccaacgcccttgtctggaccccttctcgggcctgggtccttctctttccgcctaagttgcctccttagtgtctctgacgcttcccgggactactttactctccctttctgcctggaatgcccattgccctgtcccctgtggcctgctctttcacccagtctcccttaccaaggcaagagagaatcaagagaaccagaaccaggtagagacgtctcttcttagggcccaggaagcccagcatccgacacagcatgtctccagcgtccctgttgccgctgggcgcccagaggctccccaacttgtgccacagggcggctgcgggcaatgctgccacataactgatagcgaaggcatctggacgactgttccagtacagtaatccagcgctgtcaccctcccggagtgttccccaggcggccagctctcggaacaaggcaagtccaggcagggccaaactcagtgcggccaccagcggctgcaaagcagccagccagccatgggctcctgcggtgaccccgaggaccccgcggacccctagtcctaggatggcccagcgactcaggcccaccacccagacccggagcagcggcacctcgggaaccaacagggagaagattcccgggagcatgggccgcagcagcagccagtccaccagaaggagcagggcggccgccagccagacgtgcgcagccatcgagcgtgagctgtccagagtctggtcctagcctgggactctcgacgtccgcgctgcacaggagtctccgtggggaaggaagaagggcgggtccgagggcgtgcgcgtaaagtcccgggaacccgctcgagctggtggagctgactagaagtgctggcgtttagaggaagaagaaaccgaaagccgacctcgaatcactagacacgcctccttctgagactggcttgctcaggctgttctggaagctgccgctgaagctgtagttggagttctgcctagcagccctggcctgtcgtgttcttctccatgaatctcattctcctcttcttccccagcccccttaacttgcttgcgtgaattttcccatcccaggccccaccccagattgagggcaggaccctctgtcgtcacctgtctctgggcagatttgccctgctcaggtttgctctgggcgccaaatgctggtagaacggcacgccccttgcgcgatgatggggcggggcctcagtctgcaagttgcctgcaccgcgcgcagccgctgattggaaagccgagccccgctctgctgagatgctgcgggcaggagcacctaccgccggctcgttccggacggaagaagtccacaccggggtaatgggtctcggggtgagagtcagcgggtggagtgatcagggacccctaaagctctggaagtaaaccaagagacttaggaagcttgtagcgcccagcgcttgcgctccacagtgaacgtagggtatccctgctcagaagtgtggtgtccaggggtctgtggagggatccgcatgcgaagctggtgagaaggtgcgttctttggcttgagctggaagcgtctaagggaagttgctccaaagcgctttcgctttcactctagactgcgcagttggggttactggctaaatcaagtgaggggcttggggacccctgcaaaagaggtgctgaggtgtcctggatgaagcacctgagagaaggtaatatggaggctcactgaaaaggacctacctacacatcatacagatctttgcttaacctagccccagacagcccccaccctgagtgaggacaagctctctggcgccaggattgagggggagatggggatgatcggtggtcctccttgttccaggtgctgccctgcagcacactccaccccaccctgtcccaacaccgtcattcccatgcttgcctgagaactttgcccagacctaggagctgggaagatggcagctggtttctgctctctaaaagccaccaaccacagtgttaacatggtgtggaggaacaaagtggacatttctggccttttacttgtgctcagaaagcacactcgcgggcagggtccccggagatcagaacgacatggagtggacagaaaggttggaaaaagtctccctcgctgccacggagctgtgggacttagaaatcaaatcaatcaagggttcagagtgagacctgagtcaacttgggaagctcattcgtctccataagtcagttttctcagtgcacccaagggtctcctaaggtgccttttaacctagaaggtgtgggggaagtagatgtgtctaccctccttcacttatccgtaattctttccttgacctggaaaaactctgctatccagaagtcctttcccctggctgcagagacttcgcttaagtgaaatttgtgccctacctgaaggatccttgctgcttctgtgtctcgactcctggccatgttaacccccggcctctctgtgtcccttgttcagtaacactaaggctccccttctgataaagtaaggttgcaggtgggggatccaggaccaggaaagacctggtcttgtgtcacagtaattcacagtaatgatgcatgtggtacgcaattcacaagcagcggggccggtttcctgggccttcctctcagttcttgctctcctcatgcagattgtgtctgcctccaggaaccatccttgcttttcagggtgaccttgagtcggtcacctcctgcatggacattttctcctccttaagatggaggctcaagacgctcctagctctgacttttcgtactgtctctctgcagacaaccatcatggcagtggagtttgacgggggtgtcgtggtgggctctgattcccgggtgtcagcagggtgagtagtgtcaaaggcccgtgtgttggagggaagctggtggccctaagtgcacatttttcttgcccacttctgaggagtatgataaccttccaagaaatgaagctgatctttccaaaaaagtatcataatgcattgatggagaggcgtctgggtctctgaatccatggcattcatgaatattttgtagcttgatggacataaagaaatagtatctcggagggacacgggtaggttgtagatggactgtgttatctgcagttaggataaaagataaatggtggttttctgaagcagttatctcactcatttgcctgagtttgaagtaagtttgattggtctcccgtcctggctagtttgctcacacacaagtcagactgggatgacatccatgctgtttctgccatgttccatagaaccaccgttgcccctcaaagtgatgaactgcaaggaaattctggaaagaggcaatttttttctcttgtttcactttttgtttttagagacagggtttctctgtgtagccctggctgtcctggaactcactttgtagaccaggctggcctcgaactcagaaatccgcctgcctctgcctcccaagtgctgggattaaaagcgtgagccaccactgcctgccatagaagcacacttttcttgcctaggtgttcttttgttgttttgttataaaaaaaaaataagtctttaaaagtctaatattttgggtctggagagatggctcagtggttaagagcactgctcttccttaccacccggggttcaatttccagcacccacatggcagctcacaactgtctgtaactccagttccaggggagctgacaacctcacacaggcaaacatgcagtcaaaacaccaatggacatgaaataaagataaacaaatctatttttaaaagtctagtgttttgggagtatagtctctaaaataggatctctcctgtagcccaggttgacctcaaacttgctatgtagtcaaggctggccttgaactcctgttcctcctgactctaccttctgagtgctaggagtacaagtatggccgccatgcccacctcatgctatgctgggctttgtgcgtgccaggtaggtactctaccacctgggctacacctcccctcgacacacacacacacacacacacacacacacacagagccaagcacatctaactttgattactacagtgacttactgatctgagatgtcttttttttttttcctgctttaacctaagcattgcaagctctacaattatctttttaaaccaacttgaacgtttggttcttccttacagaacagcagtggtgaaccgcgtgttcgacaagctctcccctctgcaccagcacatcttctgtgccctctcaggttccgctgctgatgcccaagccatagctgacatggccgcctaccagctggagctacacgggtacaaagccctggggtcctgactcccctcccgctaaaactccccaactgcgtggctctgccagctttgagctcccactggagtgtctgggagccagtgttctgcgtctgtgaagaggaaatcacggtagtgactccacctcccctgtgctgacttgaaaagtgcacatcactgccctgatgtaggaactcaggaagaagacagccatttggcccactcctaatatcaggcagttgccaggagaaatcaaggtcactgggacggaagcaagcttatcatctgctttaaccgacgagggcagggcccttagaggcaagggaggggtttatcattgggagtgggaaggtggagcagagaaaagcaggtgaagagccgaggacctccattgtggagctctggcccccctaggcacatgggagggaagctggtatctgtgcagccgctggttcaagcgtgacttggcagagagggcaatgggctaacaagagtgagactcagcagagtgctgttgaccctccttcccgacatccgcttcaggttggagctggaggagccgcccctcgttctggctgctgcaaacgtggtgaagaacatctcctacaagtaccgtgaggacttgttagcgcatctcatagtagctggctgggaccaacgtgaggggggacaggtgagtgtgtccattccaggtctcagggttccccactcctctcttcagagagatgaaagttgcatgtctttctagctttgtggtccagagacagttcctctaaagacatcctacagccccgattacagtggtacacatcttcagtctcggcactcgggaggcaggggcatgtggatctctgtgggtatgaagaacctgctctctagagagagttccaggcaagccagggctacattagtgaaaccctgtttcaaaacaagcaaaaataaatgataaaagcatactgtaggctcaagtgtgggcgtcccaggtcttcacagctcatctaacatgaaggagccctgggatgatcctgacctgacctgagggaccctctctctaggtgtatggaaccatgggagggatgctaattcgacagccctttaccatcggcggttctggaagctcctacatttacggttatgtggacgcagcttataagccaggcatgacccctgaggagtgccggcgtttcaccacaaatggtaactagccaactgagaagtgacttggggggagggtttgtggacgtggaaagaaagtagattgtaaagaataagaaaagaaatacaagggtggccattccgtgtcgaagcttttaaaaagaaatatttacttttaattatgcatgtgtacatgagtgtgtctctgtgtgggtttgtgcgtgtgtatgtggaagccagaagaggatgctgggtcctctggagctggagttacaggtgtttgtaaggcaccctatgtgggtgctgggaaccaaactctgtaaaagtaataggtgctcttaaccactgagcctctccatctccatcttttggaactgggagacatttgagagtgggaggggatagacaagacaaatggtaaaagagatggggctgagggggggcagtagggatggagcaggactgtcttaagcaaatcacgtaagggtatgaggtcactatgggaaccagcagtgaattgagctctcccctccacccaccaacccccgcccccagctagctcacacgaacttgatggctcagcagtcaaggatttggacaatgtgtgctagcctataggtaacttgaacgtttacagtagggatatgggcaggtgctggtttgctggacgttgtgatgtgttctggggggaagtagcatgtagttggaaagggaaggaaacgagtatttaagtcatttttttttttttttgctcctctttccaacgtgaatcctctacagccatcactctggccatgaaccgagatggctctagtgggggtgtcatctacctggtcaccatcacagctgctggtgtggaccatcgagtcatcctgggagatgagctgccaaaattctacgatgagtgactgatccccagaagtcccttccttgtttgtaataaactttctggaaccagaaggctggtgcgatgggcaaaggtgaaatatgtgtatcagagagacacggtgtgtggagggaagcgtcctccccggcccagatcagcatgcccttccattcttttgtaaaaataaactttattattaaaaaaataaataaatcattagttgcaaataaataaaaaagcatccacacaaagggaaccacattcaaagtctgcgagactcagtgaacttctagacagtaagaactgagatttaaaatggaatctgtgaagttcgacattaaattgaagaccttcttgttctttatccccatgccaaacactttctccagagaaagagagcggagcaccctgggagaaaagccctcagatatgagaggtcactgtgggttgacttctttttaattttatagatttgtttactttcattgtatgtggtttttttttttcttcctgcatggatgtgtgcaggtccctgtagaggccagaagaaggacactggaaactggaactggagtctgcttgcaagctgccatgtgggtgctgggaactgaacccgggccctctgcaagaacagccaggtgcttaaccactgagccatctctcctgcccctggatgggttgtaatattgtagatcctgtgctgaggagatggctcagtcaataaagggctagctgtgcacaaaaatttgggaccagattgccagcacttacttaaaaaccaggtacagtgacacctacctagaacttcagtactggggaggcagaaacacagacccgtggaacacattgaccaacaaaatcaatgagttccaagttcagttagaaaccctgtcccaaaaagtaaggtagagagagactgaagaagtcacctgctaatgacctgtggcctccacatgccacacaggataaataatgctttaaaataattcaaaccacaaaaattgcacaggacagctgaacacagttcaaaggtaaagctaaaaagaaagatatggtttcactttggggctcacagatgagggtacaaaccattgcccctgacaagcagctcatgggtgtcccaggagccatgttaaacagctctcaaaccccatggtttcatgtccttaggcagggtcaatcattcccttcatcctgtcagatgaaggctcagtcaccctgaggtggtttgtgtcttcagagctcagggccattttgctaataactaaatgagcaggcgtagtcaactgaaccttgagtatgaatctgagcacacagatccaatatgctctgtatggtcccgctcctttgaaaccgggtgcttgtggtgggtcatctaaactcaatgcctggatctgcttctaactctgttgtttaatttttttttaaatataaatgatagtttaagagcccaccccttcccctcgtctctccagagtatgatgaccactgagaactctggataggattcagaaagcaggaactgaaagtggccagtgagcagagtcagaactcccagcatgccctgaaaccagccccggtgcaccctgctcaactgcagccaggagggaggtctccctggtgaggggaacggagaaggggtcaggtggggactctccgaactcagttagccttaacacctcaagcctgtgacatgtctgaaccagcaccacacagccagccagcaacaagctgaaatgcaaacgcattcacactggaaggcttcgttctatcaatcaaacaactgtatcattcgttccaagagtttgaaacatctcccagaggcaagattaaaaaaaaaaaaaaagcatctgagacaaagggaaactgagggtgagaaaaataaataaagccaaagactaaaacaaatgtacaacagaactgtcaagaaataacatggcccgtgggtaatggtcaaagttctattccctggatccacgtggtcagggaagaatggagagcccttgaagctgtcctctgacctcagggcacacaggcatcttgcacaacagacagacagacagacaaataagcatataccacgtggcgctagcttacaagggctggcagacccaccgaaatacttgagagttctgaaagacagttgttaaccactggcaacttgatgttgtctgcagtggaaatatctaagaccatggaaaccgaaaacactacaagttgggactttttgagttctcaaatggccaatttaacagtacaggtattggtcacaaactatcaaacaggcaacagctggttctgagccacaaggcagtaagagcaaagaaagaaagaaaaccaggcagaagactaataaaattccatctttaaatctccatctcaaataccaaaagcgatattcaacttttgaagccaagtaggaccaggactgagtggtttatacttgtactaaagcaatccctagtcagtttcaaagagccagagtcccagtggtttatacttatactaaagcaatccctagtcagtttcagagagccagggtcccagtggtttatgtttatactaaagcaatccctagtcagtttcagagagccagggtcccagaaactgtgctctgtaacagcctggcaacttagcaacaaatagacacttagaatcctcgtgctttggaaactaacaaaacattgctcacggggatttaagacaaaacctcaaatgaagtaactcatttactgggaaatggctggtaaaaatgttacatatggaaaatgttacatgttaccagagaggcagagcctgcagattctgaattcaaagccagtcaagaatagacaacaagaatgaccttgtctcaaaaaaaaaaattacatgtccaggaaagcagaggagagactgtctataggaagagaagtcatgtctacaggaaggggacaatgaaagggaacacttgatcaaagtcttgtcccatctagggttactattactgcaatgaaaccccaggaccaaagctacctgggaaggaaagcgttcatcctgtttacacttccacatagctgttagtcaccgaaggaaatcaggacaggaatctggaggcaggagctgatgcagaggccatggaggggcgtcctcatcacttgctcagcctgctttcttatagaaaccaggactgccagcccaggaatggcgccacccacaatgggcttggccctcccctatcaatcactaatttagaaagttgttccagacgttttcttaagccatcctctcaagatgactttaacttatgtcaagttagcccaaaactacccagcacagtacttatatgataatgtcttcatgagacccgatacgatactatgcaaaacaaacaaacaaaaaaaatcatatgtcaacttctgtaggatgtagataaatatacactttgaaagaattatattccttcaaatacagttatttgggccctcaagatattgcagtgggtaaaagcacttgttgactgactctgatcttgagtgcaaatcccagatcctactgtggaaggaaagggctgactcctgaaagttgtcctctgacctctagacagccctacagtgtgcgcgcacaccacacactcacacaccaccaccaccaccaccgccactacttccaatgcaaataaatttaaggaaaaaatacatttttttttgttataacaggagaaattaaaagcaaatgacctaaaaattctcaaaaatccatgaaagagccgggactggtgatatagacctttaattccagcacttgggaggtaatggtaggaggaggagctatctgagttcaaggctagcctggtctgcatagtgagttccaggctagccaaggctacatagtcagaccttgtctcaaaaagcaaaacaaacacttggggcaagtgctggtcagacggctcagaagttgaaagcaaatcttgcttttgcagaggacccaagttcaattcccagcacccacatgatggcttacaaccatctgtgactccagttccaggggatcctgcaccctctttggcttcctcgggcactgcatgcacatgatgcacatatatccaaacaggcaaaatactcatccgcataaaattaataaatcttttttttttttttttggttttttcaagaaagggtttctctgtgtagccctggctgtcctggcactcactttgtagaccaggctggcctcgaactcagaaatctgcctgcctctgcctcccgagtgctgggattaaaggcgtgcgccaccaccgcccggcaaattaataaatcttaaaaaaaaaaagaagaagaggaagaagaagaagaagaagaagaagaagaagaagaagaagaagaagaagaagaagaagaagaagaagaagaagaccacagattactgtcaccaaaaactggagttcagttccctgtacccacaccaggtagtacatggctgcttgtaacttcagccctttactggatcatgaaatagatccactaaggggtttcatctgctttagggctttgtgcacaaaggtcgctgttcccttgacatgaggggcccaggactccttagttctccacgattggaactggattcctattgtttctgccatggccctcaactgtaaccttctgggctcccaggcttcttaatagactttactgctgccagggtttttaaagaaacctttgaaaagactctttccccctcctcccaccctcatcatcactcccccacccatgataagtccatgagttacagaccagtgggaactggtcgaatagcaaaaacttcaattgaccttcctaagaaaaaccatcttaggacaagggagaaatgacagaagaggaagcatgccaaacaccttctatatgctatcccagaatctttagtttaggatacaaagggtgtttggtttctgtctctctaaagaactggggcaggggtaaaggggagatggtgggggcataaagggggcagtgtggacaggatggacccagagccctagttcattctataatctccctttttaccaccctacccagaagctcactgcggggcacttcccacatacctttttaaaaaccaaagatgtatatattttttatttatgtgtgtatctgcatgtatgtacaccacgtgcgtgcaattcccatggaggccagaagagggcgactgatttactcaaacattttctgctttaaatattggttttaactttaagaaaaccttctgtctccgttgcttttcctnnnnnnnnnnnnnnnnnnnnaacaggagaaattaaaagcaaatgacctaaaaattctcaaaaatccatgaaagagccgggactggtgatatagacctttaattccagcacttgggcggtaatggcaagaggaagagctttctgagttcaaggctagcctggtctgcatagtgagttccaggctagccaaggctacataatcagaccttgtctcaaaaagcaaaacaaacacttggggcaagtgctggacagatggctcagaagctaaaagcacatcttgtttttgcagaggacccaagttcaattcccagcacccgcatgatggcttacaaccatctgtgactccagttccaggggatcctgcaccctctttggcttcctccggcactgcatgcacatgatgcacatatatccaaacaggcaaaacactcatccacataaaattaataaatctttagaaaaaaaaaagaaaaccacagactactgtcaccaaggactggagttcagctccctgtacccacaccaggtagtacatggctgcttgtaacttcaaccctttactggatcatgacgtagatccactaaagggtttcatctgcgttagggctttgtgcacaaagatcgctgttcccttgacatgaggggcccaggactccttagttctccacgattggaactggattcctattgtttctgccatggccctcaactgtaaccttctgggctcccaggcttcttaatagactttactgctgccagggtttttaaagaaacctttgaaaagactctttccctctcctcccaccctcatgatcactccctcaacccccatgatcttgcataagtccatgagttacagaccagtgggaactggtcgaaatagcaaaaactttcaattgaccttcctaagaaaaaccatcttaggacaagggagaaatgacagaagaggaagcatgccaaacaccttcatatgctattccagaatctttagtttaggatacaaagggtgtttggtttctgtctctctaaagaactggggcaggggtaaaggggagatggtgggggcataaagggggcagtgtggacaggatggacccagagccctagttcattctataatctccctttttaccaccctgcccagaagctcactgcggggcacttcccacatacctttttaaaaaccaaagatgtatatatttttatttatgtgtgtatctgcatgtatgtacaccacatgcgtgcaattcccatggaggccagaagagggcgactgatttactcaaacattttctgctttaaatattggttttaactttaagaaaaccttctgtctccgttgcttttcctgatgctatgataagacactctgacagaggtaatgtggggacattccctttggctcacagtgtaatgtgtcgtcatggtgggaaagtcaaagaaacagaaattttgactcagctgttcacatagtgtccacggtcaggaagaagagaacagtgaattcctgtgctcagattgtttctccttatattttaagatttattttattttaacttatgtgtatatttataactgcatgtgagtccaggtggctgcaaaagcaagaagagaatttttgtacagtctagaaccccactcctacgaatggtgtcacccatagtagacagatatttccactttaactgaacaactcaggataaccaccccagtatgcctagaggtctgtctcccaggtaactccagttctcaccaggttggcagctgagattagacctcacaccttcacatagaggactagactattgcccaataagtgaatgccatgacccagacaaactgaccccaaatgagccaccacagggctctactaaaacttcaggataagcatggcttagataccaagggaaggaatgaactgagtattaccagctggatcaccacccaggtgatagactcctacatccaagggatgtagacagaacaggtgcttaggtgagacagaaaccacgccacttttgagtgagtgagttgaacgttttgtcccaacctctgtctgcttctgactaccctggaaagcatacagaagacaaggaataagattaaagttcttcatatgaacccaagacacgaatgaaaggtttctatggtgctcttccatttaaaggcttatttttatgtgtgcctggcatgcccagaagagagtgctgagtctcctggaggtagagtgatgggcagttgtgagccaccccatgtgggtgctcagagccaaacctgggtcctctggagaagtagtatgtactcttaactcctgagccttctctgtagctgtttctgcatccaccttaaaggagaacttctctcctaagacccagcgcagacatggaagaggagcaagtcttcagtctactattgggggccatgaagctatggagccattgactggacaaccttacaaaggctctctgatgtctaagtgtggcaactactaggatggagttgggtcttgagatatgaaacacaaacagaagggcagacacccccttcaatgacctcactgacagaaatagaccctgtgtgatggcttgggtccatccaatgaaggataattgctcacaagtgattacatctaatcaatgggctaatccattgatggactcataacctcatcattattggaaaggggaaggtgggtcttattagagagagtaggtcatggggtcatgcctcggaggggttcatcttgtcctggcacccttcctgactgcctcttcctcctaccatgataggaactgttttgccccaccatgtcttccacaccatgatgccctccctcacctcaagccaagagccatggttgatcttcagctggaatctctcaagctgtgagccaaatctttaccccctctatctgtttatctgagaagttttcccacagcaacagaaatgcaacatgccctgatgttagttatctgttgctaggtaaccatgaagatgttagatatctgttgctaggtaaccatgaagccaaagcagcatcttagtacagcatgcattgaccatcaggtgctttggggacattccagcatagactgtgtgctagataagatggtatcatttttaactgtccagggagtgatggctatgcaggaccagtatccttgttcttaaattacaggtgacaaaatacttatgggtgaagtgtcaggctgctcacctcacaggctgcttcccaatggtttcaacagtgtagcggtagttagttgacccaatgggtcggatgcacacacacacacaagagctatctggattcttgaaagaaacacacacacacacacacacacacacacacactagcttaactttgaatggcatgactagcttaatggctgggcatttctagtccttcccgctgctggcaaacactcccctctgctactcctgagttaacacctattaagatctatctttcatctctgctgccccaaacaccattggggaagtggcccatgtggccattttccctgattctcacatgtcggtgagcctttagatctgatctttcttcttcccataagggtgatctctgcctccttcccctttcctggttcctagtccaggcaaatctcaaagtcccgccatagtctacctgaccagccattggtcattggctctttattgatcaatcaaaaaccaattgggaacaaggaccttcagcgtttggacaggcagattctcaattttgggggccagaattcaaagcattagaaccaattcccaacgggacagtaaatgggcaaataaaatgttgcttcttaaatactgtggcggcggtgggggttaacgggtggatgacaccacgtgaatggatctcagagaaataacactgagcaaagcagccctgaaaagtgtcacagtatgctctccctgttaatgagccattccaaacttcagtggcaaatgcaaaagtaacatctctatcctgttcggtgagctgccagtggactgaggtcaatcgcctgacagagccatgaagcataaaccagggctcccagtcacaaaccaccgcctcgaggtgtctgaggtatggacactggtctattacatgaatggtcagattcggagatgtttgggtgtagtgcagtctcccttccttataagccctactttcttagagatgaagtgaaacaaaacttgtttcctgcctccccaccttttttgaaggcagggcacaaatgcaggaactgagtcctgtcaaccagatgcacgcacctgacacttcaactcaaaagagcagcataagggcaggggattcacactgttactcattcccctggcaaagggcagtggggaagagaagcagcgactggatttggggaagcagaagtcacaggaggagttcctggggcagaagtggccaagcaggtgacttaggtaactctgcatagaagcctagttcctctccacagggtgagcagcaactagggtgggggttgggggaagggggtagaggctatcttttgggtctctgtgtggttctgagtaggtctctttgcctaaacaagaggagtctcccatccattgctccacatttcctgttgaaaagcaacacacacacatacacactttcttcaaaaacaaaaagcaaaccgacaaacaaagaagtagatatttgcatttgtaaactgttcaaatagaaaacccaaaactatgtacaaagaaatggtcttggttgtgacaggcttgctgacatcaaaggtccgtgagacatggtactttgattgctactgtgtgttcgtatgctgtaaaacagaaaattaaaagacaaagttgaaaaaacagtcttaaacctgcatttacaacaacaccggaaatatccagttagctgtg

SEQ ID NO: 203 - DNA, 806 bp, Mus musculus
gccgagccccgctctgctgagatgctgcgggcaggagcacctaccgccggctcgttccggacggaagaagtccacaccgggacaaccatcatggcagtggagtttgacgggggtgtcgtggtgggctctgattcccgggtgtcagcaggaacagcagtggtgaaccgcgtgttcgacaagctctcccctctgcaccagcacatcttctgtgccctctcaggttccgctgctgatgcccaagccatagctgacatggccgcctaccagctggagctacacgggttggagctggaggagccgcccctcgttctggctgctgcaaacgtggtgaagaacatctcctacaagtaccgtgaggacttgttagcgcatctcatagtagctggctgggaccaacgtgaggggggacaggtgtatggaaccatgggagggatgctaattcgacagccctttaccatcggcggttctggaagctcctacatttacggttatgtggacgcagcttataagccaggcatgacccctgaggagtgccggcgtttcaccacaaatgccatcactctggccatgaaccgagatggctctagtgggggtgtcatctacctggtcaccatcacagctgctggtgtggaccatcgagtcatcctgggagatgagctgccaaaattctacgatgagtgactgatccccagaagtcccttccttgtttgtaataaactttctggaaccagaaggctggtgcgatgggcaaaggtgaaatatgtgtatcagagagacacggtgtgtggagggaagcgtcctccccg

SEQ ID NO: 204 - protein, 226 aa, Mus musculus
AEPRSAEMLRAGAPTAGSFRTEEVHTGTTIMAVEFDGGVVVGSDSRVSAGTAVVNRVFDKLSPLHQHIFCALSGSAADAQAIADMAAYQLELHGLELEEPPLVLAAANVVKNISYKYREDLLAHLIVAGWDQREGGQVYGTMGGMLIRQPFTIGGSGSSYIYGYVDAAYKPGMTPEECRRFTTNAITLAMNRDGSSGGVIYLVTITAAGVDHRVILGDELPKFYDE

SEQ ID NO: 205 - DNA, 26008 bp, Homo sapiens
tgccccgacctgcattccccggggtaaagcgagctctggagatcgcatagagaaactgtagtgtcctgggtccgagcgacgcccgcttcccgcaaccgggagagccgattccggccgctgccctcggggggctccgcatacatctagtagcgccatgaccgcccagcacccagagatctgtccgctctcggaggaggaagtgaaagcgaaagccacagatcgaaggggagggaacaagactcttttccacatccccctgccttttccgagaaaaggacagttagtgcctggaccaggaccatcacactggggaccggcttctctgctctcccgttatgggggtcgggggaatgatgggtcaagggtcttccgaagaaagcgagaaaggaacaggcgccttcaaaagcccacttggcgatgggttacagtaagaggtacctccaggcccgggcatccgctggaaacaggggtgggtagggtcgtgtcatctaaaggcgcagcttcaaccagaagactagaagtcagccaggagctgggagtagtgtcacgcggggtgggggttcctatgagcatcactttacaaaaccaggagggacggaagtgcgagggggcagagtcttggaaacaggtcctgggccaactgcaacagaatatacccgccgcgtgtaggggaaggcggcgccagggagagggcgcagtctctgaatctttccacggggtccatcctagggcccctccaggttcaacggtctcctaacctgtagtcacccacaagagcgtgccctttctgcccgcccttcctagcgttgctccctgcttggctgagcactgcggagtttcacgcctctaaaccccgcctcttcttgcaacctgtgttggcctcatctacccagcaactgtcgacgtcacacgacctgggcctccctgaatgggagatatttactaggcaatcccgcctactgttctgaggtttcccctccaggtgcagcttcagagccaggcgagccaggaaggaccagcgggcgaggtggtgagttgtgaggcgcgcccagtccctctgttcccgcctggcacttgctctggccgcgcccgccccatctgccacttcggagaggccacggctctgagctgcggccgctagtgccctgatgggccctgtggctggggtcttgcacattcttgggggtgggcctaaggggataggggaagtggaaggggcctcataggaattaaaaagcttaagggaaaaggtgatgcagttagggggtaaaacattgaggatgataaaagaggagacatccgcagctgaaaagtgcgctgcaaaaggcagtgggccgtttggtgtgccggaaacataagaaaccacagtacaaaacaccaattttattataaatatcaagaacctacagggtgtttatgggccagcatatgccttcagttatgttgaaaatagctgatcatctttccgtacattctgaacatttctcagtttcagagtgctggccacaccaaagcatcagccctggctctaaactccgttacagtaaggaattacaaatcctgtgtttgtactccaggaagtctgcattatcacgaggagcttggaaaggaggtaacacactcaaggcaaatttcaagtaactcatcctggaggcagctgcctactctgcagctgtggttctccaccacagagagaagaaaagggagggagatggagtgcgcaggtctgagaaggctttcattctggagcatctgcaggagcctgcaccatggcccagtagcacccctttttctccatgagctgctggtgggttcccccctcccggatagcgcctccttccagaaagaggatgtggtcagcctgctccaccaggctgaggtgctgggtgatgagaagcactgagcgggagtaccgctcagggctttcgtacaggagctgctccacctgaggaaagacatcggaccgtcagagccggggactaccctcagcccagggagacacctgtgtttccagggctgggactgacctcacaggatcactgctggctctgctaacaaccccaaggacaccaacgtttcccattctgagtacttctccgcaaaccctttgtttcattaaggactgttttacatgaagggtgcaaaagtaggataaaaatgagaaccctagggtgaaacacgtgacagaagaataaagactattgaatagtcctcttctctacccatggacttggcatttttatattcgattttaaggaaatataacttagtagtaaagagatgagcattcaagtcaggcagacctgaatttgggtcaaggctgcgccactcaaaagctatatgacctctatatgagcagcttattcaacctcttttaacctccattttgtcatctgtagaatgatgataaatgcctagctcagaaggattcctaatgaataaatgagtgacagtgcatgtaaacagactagcttaattaatattaatatgattaggatgggctgggcccggtggctcatgcctataatcctagcactttgggaggtcaaggagggaggatcacttgggcccaggagttcaaggccagcctgggcaacatagcgggacgctgtctgtacaaaaaataatttttttaaataaacgatattatgaggatggtcttttccttatgtttcgctttagaaattcagtctataggactgggcgcagtggctcacacctataaccccagccctttgggaggctgaggggggcagattacctgagctcaggaattcaaggccagcctgggcaacatggtgaaacccatctctactaaaaatataaaagtcaaccaggcatagtggtgtacacctgtagtcccagctactcgggaggctgaggggagaatcgcttgagcccagcaggttgaagctgcagtgagccaagattgtgccactgcgctccagcctgggcaactgagtgagacactgtcttaaaaaaaaaaaaggaaagaaagaaagaaattcagtctgtagtttgtagatagtctcttttaactgattctaggtgtctttgcctcgtcttctatctctactccttggggaggcatccaatggaactggatttgggaactgagaactgcaaggactggtttgtataattatgatgttagtaaaactaacagaagatgtataaaagaagcaagattgggtgggatatagccattaagaagatgactgcctcacctgtaactggctgtttgcatccagggcactggtggcatcatccaggataagtacacacggtttccggatcaatgctcgggccaacgccactgcctgtcgctgaccccctgacagctggctcccagcctcgtctacctctgcagagcaaagggccaagatgagaacggtatagccacatgtgtgcacgcatgtacatgcacacagacacactcatgcattcacgcactcacacacaccaagatctgacggttgtagctggataggggagattctgggaagatgaacagaatcctgaggatgtcaggatgaagaagccataggagcatgatcttacaacttcaaattgatgtccatgagtaaggaggaactgaaggataaaggcaagactactggggtttcagcaaaggtaaagatggctgggtggtgagatgagtggagagagtacctgtgtcatagccctgagggagtccagagatgaaactatgggccccagactttactgcagcagctgtgatttcctccatagttggcttctgggtcaggccataggcaatattttcttgaagacttcttccaaatacctgtggctcttgtcccactgcagccacctgagatgaaatatgatgaagagtcatagaacaaggcacatgggagtatggttatctagagatcgaagactcaaaatctttattgagaacatgtcacaaaatcatactacctccctcctgactacaccaccatctccacccaaggtctcttatcattccctaacccctctttcagagtgctcagtaagaatgctcttcgtatttgatgctccctgccctccttcaagccacctgcttccatacctgcctgtgcaggtagcggtgctcatattggggaaggggcttcccatccaacagcagctgtcccccggtgggctggtacagattctgcagcagggcagccactgtgctcttcccagacccattgggtcccaccagcgccgtcacctcgccagggcgtagggtgaatgtcagcccctagaggccagagaagcacacgataagaggctaccaaggcctctaaccttgagagtgtcattgccttgttacatagcatgatgtcttaccccagaagaaaaacagggaaatatagaaactcctaccctcccacatgcacagatttctgggtgatgcctccccaaggagtagagatagaagaagcggcaaagacaagggcagagacccagcaccactatgccacacacttgatgtcagataccaccaggaaagggaaaaatcacattccaaattacaaaggaaaaggaaagatggaagaccgaagacacagattttgctgcagcaattccttggaacgtgagagcactctcttcgaaacctcttctctcattctctttggaagcccaaactgggttcttgagtttggggaagatttatggaacagatgatgcctaccattgcctttaaagggttagggaggatatatgcttggcagtaagcaggctgaaggcaggaagaaaatttaggatggcagaattgcagttggggccagtggaatacagggagtggtaggttgtacctgtagcactaagacatctgggcggtttgggtaggcaaaggagacatcttggaactggacaaggccctccaagtgtaagggagtcaacagaccactgggtgggcagcgaggggtgcggtccaggtactcaaatattttctctgaggagcccacagccttctgtactctggggtagatggagagcagtacctagagggaggtaagaatagtgaaagtgaggtagtctgcttgccagcattatgtgaagcaagaagggtaaagaatggaaggacatcacacagatggtgctgggccagaggaaggaatcacactggggagtgaaggtggagggacctcacctccacagcctgggtgaactgcatctggtagagaacaaatgtgacaaggttcccactgcttacagccccactggtcaccagctgcccaccaatgtagaggattcccactttcagcagcatacctgaaatctataaagagaccacaaaaaaagggactgaggtagagaaatctggaggggacacaaagaaccacagtcattaacctgaaggaaatatcaagtccctgtctcctaagtgacatcggcaggctcaataggcagacaggagaatgaaccagagaccccatggagtctgactcaatgcacatcatgcaagtcacagttatcttcaccaccatcaccactatcaccttgtctggggagcattttactcttcacaaaaggctttcattcatgtgatgtcagctaatacatgaagagccttataaagaaggttatatcactccatttttgaaaaatgaggaaacaaccagtcgggcgcagtggctcatgcctgcaattccagcactttgggaggccgaagtgggcggatcacaaggtcaggagattgagaccatcctggctaacacggagaaacctcgtctctactaaaaatacaaaaaaaaaaaaaaaattagccgggcgtggtggcgggtgcctgtagtcccagctactcaggaggctgaggcgggagaacggcgtgaacccgggaggcggagcttgcagtgagcccagatcgcgccactgcactccagcctgggcgacaaagcgagactccagctcaaaaataataataataagtaaaaataaacaaacaaacaaacaaataaataaataaagaggaaacagtctcagagaaggtaaatttgttgtcatgatcacaagacaagtaaattgcatcatcaagccaggatcttcggatcactggcgtagctctctttccagtgcatcacagatgtccctcatccctggcttccactattcccatcactctcactaacaaatctacaaggtaccagcatgaagcagtcccaggtgcaagaatttatggcgccctgcacttcccctgagaggcaaaggaaggccctaggactggaagacacgcatctctccaatccacatggttgggtggattttatgtaccatactgaaaggaagccacctagcatctttaaagagagggagggggctagggacactgagtagagtcattgagcctcaggttgctaggacgaaaatactgaaccaaccatttcccagtaaaggaggagtgggagcagggtcataggaatgggaatggagtcacggcatcttaaggacaagggaatgggtattcatcttcaggtgctcacactagtggtccaggagttgactgcataggccacagcctccttctggttgagtgtctttatttcttgcagcttttccctaaacttctgggcttcgccctcctcgttggcaaagcttcgaactgtaggcatggccgacagagcctcaatggccacctggctggactttgccagagattcccgcacctgcacttccagcaactgtggatacatggacaagagatgtcacacgggttggcaaaccatcagggacactaatacctgagttacctatttggaaattaaaggtgagaagagacagaggaaaaggagaaaagagaaagagacacagctatgccccttggatgctaaagaaatacgaggaagaggaaaatgactcagaacgggttggggatcaaattcttaaagacagattgtggggagaagctagaaaagaagacccagagagtatggaggttaatgttgagcaacctgggaacatggaccacagggacagggtgttccatgaagatggagaatcagtaagggtgccaggaaagctggactgaaagcaatgtgagaggaactgagtctgccaagtctgggagatgagggtctgtgtagagcgggccaactccatgaacatacctggtaccattttcccaccttcttgggcagaaggaaaagcagaggcagggtgatcagggtgaccatggtgagggacactgatccccagagcatgatccccaagagacataggcctcgcaccaggtaccacagaaataagctcagattctcactcagagaatcactcagggtggacgtgtcctctgttacccgagacatgatgttacctgcagggttggggagaagagagtgaggtgaatcagacaggttccaagtgatgagacgaactaacaatgagccaggatgccagggtcaggggtgtcaacatggggttctaaggaggctgcaggaaacaaggttagggttctccagaggtctgcaaatctcagtgcagggaagatgagtgttaaagaggaaaggcctgaccttcattttaattataaagtcattaatgcacatgtgaatttccattttcctgaaagctttctgttccctagagaacctgtatgtcccatgctatacacacaggcaggaagagcttaaactggtcacataacagagatggaggaggagggtgctgctaggaagcatgccaaagtctgtggagcactcactgggactagggttctaaccccaggtctatctctagccatatgtaactgtacagcttctagtgctgctagaaagcatgccgaagtctgtggagcactcaagagaccagggttctaaccccaagtgtgtctctagccatatgtaactgtgcagtttcagcatttagggtcttggcctcagtttccttctctgtcagatgaggcagttggtctctatgagctcaaaatttccaggtttgaaattctatggtttctatctaaggatacataggaatagatttataagaaaatgctagatgaaaactctaggtttttcttaaggtaaggaggacaatattttgctcctgaggtatatcaagaatgagaaaaacaattgtgtgtgtgtgtgtgtgagagagagagagagagagacagagacagagagagagagacagggagagggtatatcaagaatgagaaggaacaatgtgtgtatgtgtgtgtgagagagagagagcggggaggggggagatcaaagcagatgtatgaggatatgaacagtacatggcgtataatgaaagagtttcaggagaaacctgtctggttctgttggaaaaactccgtctcctggcgcaggacagccccaaacacctctccctgcaagtggctgtgcacgtggcccatggtgttgttatagatcccgtcacccacgaactccagcactgcactataaagaacccggaaaaaaaggggatcagggtgtgttcagggaacagactgaaggtcccaggtatccccatataagtgcatttcggacagcagccccaacttccaactccctcatttgcagggtgccccattttcagcccccagacctggctatggtgagaatggacatgagagttaagtttcgagtgaaggtatcggctgagccatcttgtagaatccagtcagtgaggcggcccgtaaagaatggaatggccatctcccctggagaaagagaagagaggtcacgcacaaatattaagtctaagtaggtcagttccagtcagactggccccaccacgcctcctccccctcaccattatcctggagggcatcagcagaaaggaaacactgacgtctcaatcccgaacctaaataggctgccctggaactcactaccctgtggttgctctaccagaactttcaggattttattaggaaggctggagatcatgaagtagaaaagcctcctgttagagatgaggatgccccgcccttcggccccagagcaaaggatttccccgcttccggcgtggcccaaagaatcaagacccggtcagcaatggagcccagaacctctggcccccgccagtccagtgccgtttcttctacaccgaagtggtgttccaagacccacgctaggagtccttctcctgctccacatttcccagaacccacgctactctaccttactgacaattacctttgattcctgtcccagtccccttgtgtcctcccctcttgccctgcgttccccttaccaagagaggagaggaccaccaggaccaggaacagcgagaggcggcgcgtctccgagcccaggcagcctagaagccgacgcacagggtttccagagccgccctgaccgccgggcacccagaggctcccgagtttgtgccacagggctgctgcgggcagtgccgctgcataactgacaacgaaggcggtagggtgacttccccagtgcagtagcctggtgctatccgcggacccgggggctccccatgagatcagctctcggaacaaggcaagtcccggcagggccaagcccagtgccgcagctaatggcttcaaagcagccagccagccctgggcacctgcgttttcgctcttggagccaaccgttgccctgaggaccccgcaggcccccagccagagcacggcccagcggctcaggcccaccgcccagacccggagcagtggcagcgcggtgggcaccagcagggagaatatgcggggcagcgcggtccggagcagcacccagtcggcgagaagtagcagtactgtccccagccatgcgagagaagctccggggaggcagcggcacccgcggggagcgggacacctagagctagccattggcactcggacgccgtcccggtcccggccgggcctgggactctccgcgccccggtggggcctgaagctccgggtaccgccgagtcctcccctactggcggctgggggagggaacgagggcggggctctcggaaagtcccaggaacaggctgatcctgcgctggcgagaagctcagccatttaggggaaagcgaaatcgaaagcggccgcctgctcactagataacgcctacttccaaaagtggcctgcccagactattttggtagcaagcgtggaaatcagatctgagaatctcgggagcagccctggtgcccaattttctccatcacgcacacccttctcgcctctccctgcctcctgcctttccacttgcaccagttttcccaccccagcctcagggcggggctgcctcgtcacttgtctcggggcagatctgccctacacacgttagcgccgcgcgcaaagcagccccgcagcacccaggcgcctcctggcggcgccgcgaaggggcggggctgtcggctgcgcgttgtgcgctgtcccaggttggaaaccagtgccccaggcggcgaggagagcggtgccttgcagggatgctgcgggcgggagcaccaaccggggacttaccccgggcgggagaagtccacaccggggtaatgggtctgggcttgagggttggcagaggggtggaggagatgcagcggccaggggaccctggaagcgcgcgcggagaagtgaatgcagagaccaacgggagcgcagggaggtcgcctgtagcagccagcgcttgcaacccgcaatgagcatagagtatttcttttctgaggggggtcgtctagagtgtccgtgaagggaacaggcacgcgaggctggtggaaaaagcgggtgctttgactcttagctggaagcgtcaacgggaagctactctaaagcgctttcgctttcactctggtcccggacagtgggggctggttaaatcaagaaagggggttggggatggtgcaaagagatgaggaaatggtgccctgggtgaagtagaacagcacttgggagaaggaaatataggcacttattgagaaggaccaactcatcacacagacttttgataaacttgccactgggcaactcttagcccaagcactgataatgggcgttctgtgttaactagtgatgcccttccctagcttgacccaggaaggcctctccttggcccagatgctgccttactcccttccctgtgtcttccctgcccactcccatgtgcccactggggggactttgcttaggatgggcgcctggggcagatggcagccccaagactggctggctggcttctgctctggactactgccaccactcgtggcttgggggcggctttgttagagaggaatagcctctaacttgaagttaaccctgttctttgaccctctattcatgataagtcggtccgtcggaaagcatactcagaggagcgtcctttggggccagagtaacttacggcctggtaagaaagacacagtgaaaccacttataatttgggaaatctcccctcactgccaaatgagcagtggcaagtaggaagtagaagtggaaacaagggataagagttagacctgaattttagtcccaggtctactattaactctgtgtgactttgcataagtcgtttgcattttctgtgacttggtttcctcatttgaaccgaggatctttaaggctccttccaactcaatagtagaataaatgtagctttatcttccctcacttcttcttgattcttttcttgacctggaaaagtcagcttaaacttctcagtcaaattatctcttggtacaaatttacctccctggctgctgagatatgtatttacctcttgatcggaaattccataactgaaacttttattttcaaccatctgtatgtgttccttgctgcttctctcctgccttgcccctggccatgctaaccactgccctcctcgattttttccaatgttcagtaaattggaagagctcacttctgatgaaatggggggtgagagtggaggattgtggaccaaaaaaaaaaaaatagactgaccttgtttcccaagatcatagtcaattactctgtgttgggtctacaccacatctgcacatactatgagcccttccgttggagataattttcacttgcggagctgcttcacttctacctgtaggagcctcatctccacctctctacagtggagaggattccactaggcaagttggaacttagggacacagttctttctgtgttgtatcacagctgggctgtggcattcccctgcagccggatgaagcaatagagaaagtggaaagatgaagggaaaaaaagcctgtactgacagtcagctctggcctgttactgtgtaatctttgagccagtcacttcgcctctctgggaatgtttcttcttctctaacatgagggcatcaaggctgttcttgccctgacattccatattctgtgtctctgcagaccaccatcatggcagtggagtttgacgggggcgttgtgatgggttctgattcccgagtgtctgcagggtgagtaaaagtgaagatgtatgcatttggaaagaagctaatggcctcaaatacacactttccttacccattcatgaaaagactggcaaactggagccttggaggaatggagttgaccttccccaaaagccactatgataagctatttggtgggtgcttgggtctctgaatttgtggaggaggatctggggtctgaatgtgtatgtgacctgtcccagtagtgtacagggatgagtaaaggaatagggtctgagagggggacaggagatagatttttgagggtcttctttccatctgtgcttagggatcaaaaagatgattctgtcaagcagatacctggtttctcatttaccatatattgaactattttgtctcttctcccactcctaaccaatttcctcacatgcaaaatgagtatatggggttaggtcaatattactgacattatgttccatagaacataactctctcaagattgttaatagcaaagaaaattgatgaggcatatttttcttaccttagcattttttgctttgttataaaatctaagcctgaaaaataagcctaattttgattaacatctgcagtgattaataatatctgagatgattatttgcctcctgctttaatccaagcattaaacttcatgctattctcttgtcaaagaaatttgagagacattgaatgatcaccctcaaaaattcctgagttctggttgggtgcagtggctcacatctataatctcagcactttgggatgccgaggtgggcagatatttgaggtcaggagtttgagaccagcctggccaacatgttgggaccttgtctctactgaaaatacaaacattagctgggcttggtggtgggtgcctgtaatcccagctattcgggaggctgaggcaggagaatcacttgaaccagggaggcgaagtttgcagtgagcccaagattgatccactgcactccagcctgggtgacagagtgagactgtctcaaaaaaaaaaaaaaaaaaaaaaacctgagttttaacttggtgactgttgactccctcctgacagcgaggcggtggtgaaccgagtgtttgacaagctgtccccgctgcacgagcgcatctactgtgcactctctggttcagctgctgatgcccaagccgtggccgacatggccgcctaccagctggagctccatgggtatgaagctctggagttctgactccccacccactagagctcccccaacctgcatgaatccctgtacagtgtgctgttccaggagctggacactgggaaatggaaaagtcttgtttcggctcttgctggcacttgaatctgtcagtttctgcatctgtaaagtggagataatatagtacctcatgagacggttattttgagaaccacattctatatgtgaacacagtttaaaagctgtaaatcactatcctgatataaataatcaggaagaaggtgatattgtgacccaccataatatcaggcagttaccatacgagaaatcaaggtcgttgggacggaagtaaccttatctgcttttccccataagagcagggtccttgcagccaaaagaaagttatgtgggtggggctgagcaaaagagtgagcaattgaaagcttcttaccagttggtggtgtgggactctggttcccctgtacatgtgggagggaggctgcagtttgagctattgcagttacagttttcaggggtcgtttagcagggatgatggtaacagtataggagaatgagacttaaaattctatcaacctttattcctaatatttccctcaggatagaactggaggaacctccacttgttttggctgctgcaaatgtggtgagaaatatcagctataaatatcgagaggacttgtctgcacatctcatggtagctggctgggaccaacgtgaaggaggtcaggtgagtttctcccaaagcactctctcctctgggcttccccactctcctgcagaggaagatggaagtcctatgtcattctagcaatgagttccaaggacactacctctgaaagcatagtactttggggatatgagataccagggcttcattgcagggtgcagagaccacttaatgtctcagtgggaaggaagggcttgatgattctttaacctgaggatccctttcccaggtatatggaaccctgggaggaatgctgactcgacagccttttgccattggtggctccggcagcacctttatctatggttatgtggatgcagcatataagccaggcatgtctcccgaggagtgcaggcgcttcaccacagacggtaaccagccaagtggaagggtacctggggagggctttgaaacatgggaaggaagtagattatgaggaacaggaagagaaatacaggggtggccatttaagttaatgccgggcctggtacacttttaagagtgaaaaggggcaggacaaatgcaaagctcaatggggttcttgggcaatacggataaaccagggctgttctgagtaaatcaaatgaggatacacagtcactgtgagaaccagtggtgtgctaagcacagtggctcacacctgtaatgccaacaatttgggaggctgaggcaggaggattacttgagcccaggagtttgaggccagcctaggcaagatggtgaaaccctgtctccacaaaaaacaataaaaaaaagtaaaaaaaaaaatgaactgggcatagtggtgcacacctgtagtcccagctactcaggaggctgaggtggaaagatcatctgagccggggagatcaaggctgtagtgagcggtgattgcaccactgcgctgcagcctaggtgacagagagagaccctgtctggagaaaaaaaaaaaaaaaaagaaccagtggtgtgctgaggtgtgctgaggctggcttgggaccactcatgagagcggactgttaaatagtcaaggatttgtgaactgcttagctatttgtaacttgcaattcatcatagcgggagcatttacaccacggacatcagcagatgccacatatggaagcctttttgtaaaaaaactgatttaccagcacaccactaaatatgccttcctggaagatgagttttgaggtgaaagtggtagtaggcatatggatggagggggagtaaaaagatttttgaagctaagccatcctctctctccctctctccaacttgaaaccctctgcagctattgctctggccatgagccgggatggctcaagcgggggtgtcatctacctggtcactattacagctgccggtgtggaccatcgagtcatcttgggcaatgaactgccaaaattctatgatgagtgaaccttccccagacttctctttcttattttgtaataaactctctagggccaaaacctggtatggtcattgggaaatgagtgctcagggagatggagcttaggggaggtgggtgcttccctcctagatgtcagcatacactctttcttcttttgtcccaggtctaaaacatctttcctagagaaaacaaaagggactaaactagaaatataaagagccctatacatgacaggtgatcacgtactgaatgattttgaagtagtacaaacaataaaaattctcattccgcatcatcatgcggtccatgatgatgaggccgcaagtgaggtgatgggactctttcctttaaggctaagactgacagataggcaagacacctacacacatgagaattagctaagactatcagcaaactcgcatgtaaaagaattcctttcataatgcattcattcatattaaagggcaatacatgaaaaatgcttaaatattttggggcacttgtgaatttcaaagaataatgacaataaccaaaagaagctacatttgtggcattggctaaatgttttataaattttatctcttaaaattcaaaccaaaaaaccccctgtattcacacctgtaatcccagcactttgggaggtcaaggcgggaggattgcttgagcccaggagttagtgaccagcctgggcaacatagtgagaaccccatctctacaaaaaaatttaaaaattagtcgggtgcggtggtgcatgcctgtagtcccagctgcctgggaggctgagtgggaggatcgcttaggcctgggagtttgaggctacagtgagctgtgattgcgccactgcactctagcgtgggtgacagagaaagaccctatcttaagaaaaaaaaaagaaaagaaaaagaaaaaacaaacaaaaaaaacacccaaccctatataggtattattattacttctataggacacatagaggtttggaaagattaaatcacttgaccaaggtcacaaaataagttctgaggctgggatctgggattcagtcttattatatgcccttcctctaccactccctaaaacttctcattccctcaatccccatatatcatcttaaaatctgcaataaatagccccatacattcgttggcacttaggaaactgttaccagatggctgagtaactgtattaaaacaaatttaattctgcttctatctttgccttgcacttcctgagtgacaggagtgaactctcatatccttttctgtcaaaagatggtgctgaatgatttctaaggtagtttacagttccaacattcaatgccattttgctaacaagtgggcagtcaacaggcatattcaacagaaatactagtaggatctcaggctaaacatacgaattcaaaactctaaaacaatcacatccccctggagtgtaaagaaaaaaatctaaaattacaaatgcctggagttgtttctagccatgatatttaacttatttgagattttaaatagcccatttttcccactgatcacaagtagaaattctgggcagtatacaaaaagcaagtactcaaggactccaaaaagtaaacaaaagcaggtggattgtgaagagggtcaaaactgggagaggggcccctcctggggagtgggttttcaatgttttccccttttttcctcccagctctgccctgacgtcaggcctcaggtgcagagctgcactgcgtggtagcacaagccctgagttaacaagagaaataccggctttctggccagaggaatgaagaaaaagggcccctgcgggcaggaatgtgtaggggaatctccaaactgagagtacaggcggaaattccctaattctgagtctgaaccctcaggagtaccaggttacccctgagctgcacatgcgtgtgacatgccttaagggcacagcaaagactttgagaactgaatgaagattagatcttttaaaattggaagacttcggccaggcgcggtggctcgtgcctgtaattccagcactttgggaggccaaggcgggtggttcacctgaggtcaggagttcgtgaccagtctggccaacatggtgaaacctcatctctacttaaaatacaaaaattagctgggcatggtgcctgtaatcccagctactcgggaggctgaggcagggagaatcgcttgaacccgggaggcaaaggtggcagtgagccaagattgcgccattgcactccacctggacgacaagagagaaattccatctcaaaaaaaaaaaaaaaaaaaaaattagaagacttcatttttctgtattggccaaataactgttctaatgcccttcattccaataaaaggtttgtagcagcttacagagataatttaaaacaatttttaaaagaagaaaacaacactgggtcagagagaaaatatggttaagaaaagtaagtgaagccaaggagtgaaactaatggaaactaatggacaacgtgaatatcttaaaaaaaaaaaaaagtggtgcgctgtcttatactggctagcaagagcagattgcaaagtattcaggatttttgaagacagttgttaactattggtaacttgatattgaccactatggaagtatttatactatagaaatcagcaatgctacaagtcagaagcattgtttttcttcagagagccggtttaacaggacacatatttatcagccaactataaatggataaaaaataattggctccaggccataggatagtgaaagcaaagaaggaaataaaatgaggtacaagattcataaaattcattttttaaaagttgccagaaaaccaaaaattatatataatagttcaagccacacagaacatttactcaaataggacatgcatcattccataaaggtaacgccaataaattccagagtatcggtatcttagaaactatctatattctaggccaggagcagtggctcatgcctgtaatcccaacattttgggaggtcaaggtgggcagatccctagagcccaggagtttgagaccagcctgggcaacatggcaaaaccccgtctctacaaaaaatttagctggatggggtgcacctgtaatcccaactagtcagaaggctagacgggaggatcgcttgaacccaggaggcagaggttgcagtgagctgagattgtgccactgccctccagcctgggcaacagagtaagacactgtcttaaaaaaaaaaaaaaaaaaagaaaaagaaagaaagaaactatattctgcaaccatactgtaataaaattagaacttgataactaaaatatacttaaaattgtaagtgaacaaatatatttatcagtaacatggatttaaaaggcagtcgtggatgggagcatcgctggagtccagaagatggaggctgcagtgaggcatgattgcgtcactgcactccagcctcagcaatagagtgggaccctgtgtcaaataaataaacagcagttataaagaaaattaactcttttagaaccaggtgttaaaaatgttacacataaaatatacatataaaataatattataatttcaaatacatttattagaacaagaaaagttaaaataaaggacctagaaattctactcaaaaatttggaaaaagagaagttgagcaaacctaaagaaatacgaagaaaaggagttataaagataagaatagaaagcaatgaaacagaaatagagaacaaaaaactaggtagtgaaaattaacatacttttgattccaaaagctgcttacttaaaaatatttgtaagatattcagagttacaacaaggccgattatggataaagggagaaaaaatgaataaacaaatacataatgaaaaagggggaacagctacagatatgacacagatataaagcatagagtgttatgaacaagtatatgctaataaatttgaaaacctaggtgagataagcaaattcctagaaacatttaatctatcaaaattagcacaaaaagaaatacaaaacttgactataccaatgagtattaaagcaatttttaaagttatcaatggcatctaataaaaaaatatatttttgaaaatgcccagatggtttcacagatgagttctatcaaacattcaaggaacatgaaacttctatattatatactttttccagaaaacagaaaaaaactaaacctgattagctaattttatcagccgagtgtaatcttgactccaaattgagttgtggaaaactcaaggaaaaaaaaataatagacccatttcaccttgaacacagatgggagaaaaaaataattatttatgaaccgaattcaacaatattacaaataataatactgggaggccgaggtgggaggatcgcctgaggccaggagttcaagaccagcattgtcaacatactgagatcctgtgagatcctgtctctacaaaaaattaaaaaattagccaggtgtgatggtgagcacctgtagtctcagctactagggaggctgaggcaggaagatcatttgagcccaggagtttgaggctgcagtaagctatgattgcaccactgcatttcggcctgtgcaacagagcaaggccctgtctctaaaaatatgtataataataacaataataataatgattatgctaataatgatacatcaagatcaaatagggaatccttggaatactagggtggttcaatataataaaacatattgttgctataatttaccatattcatagaaaagtcatttcctttgctcagtctattaataaaagacatttggtaaagtatatccatttgtgatttttgaaaaacagttaaggaagcaggaatcaaaactttcctattttggcaaaggttataatccaaaaaatctgtaaccactagtatacataacggaaaaaccttgggtatccaagacaagaatgttcactataattactagcttatcatagcactaaagcctatgggcaacataacaagaccccatttaccaaaaataaatttaaaacattttaattagctggcatggtggcatgcacctgtagtcctacctacttgggaggccaaggcaggaagattgcttgagcccaggagtttgagcttactgtgagctgtgatcacaccactgcactccagcctgggtgacaaaggaagaccgtatttctaaaaaataaaaaatacaaatacaactacaaactagcactagaccaacagtgactatgtaccatgaactgaggaatattattaattccaccatttgcatctgaggttaacaatatgtcaatgacttaaataacatcatatctctgagagtaatttctcctatatttccatgacaaatgttagataattttccattttttccattcaataaaataaacaggaaatataattaaagagttcaattgaggattgggatttagaaaggaaggcaggaattaagaataatccttagttctcttcctaatttgcacctctctcactgatacatatgtattattttctttttatgtcttttagaatctaataaacatgttttatattatataacaaactagaatatatggattatctttggtcttccttaccaagttcttaactctgctggctctggggcactggacataccatgtaagaagaaaaatgttttaactccattgaacttattcagaagcatcggaaattggttcagcaatattcaactttgcccagcaatgtttatgaaagtttcatatatagtatagtataagtatgtgtaatacagaatttatgttctcaaaaatgaagagataaagtatggagattctaaactctgttgacatagaagagggtggatttctcgaagaaacagccttctatagaaagtggcttgtatgagtcgggattctccagagaagcagaaccaataggatgttggcagagagagatttattttaagtaattggctcatactactgtgggagctggcacggtcgaaatctgcaggtaggctggagacccaggaagagctgatgttgcggcttgagtctgaaggtggtccagaggcagaattccctcttccttggaggacctcagtctttgcccctaagaccttcaactgattggaagggccacttacattatggagggtaatctgctttacccaaaatctattgatttaaatgtaaatctcatctaaaaaataccttcactgcaatatctagactggtattcaaatgtctagaaaccatagcctagccaagttaacacataaaattaactatcacttggctcaaggtgaaacttccagatcaatgtggcaggagtgttgaggaaggaagtgaactcggttctaaccaagtaggacagccgaatcatcactgaagtgtggcactggcctttcgccaaggtaacatgtggcaaggttttaggttaggataggtaccaggcaaaagctgggtgactcgatggaggcttttgtgccaaccttcagagactggctgcgtcagactgccctcaagagcatacaaaggaaaaaaagacaaattaaaagcctttaatccaaactcaagacatgaatgaaaaactgtaaatgcctctatagcagttttaaaggctatcttttctcctgcaacccagcacagatatggctgagggtcaagcccgggggcttatgataaaggttatgaagttgtagaaatgtttgttgcatcatccaacagcagctgttgtgataaggcaagacccctggttgggatagaccggaccctgagatatgaaatagggacatatgagcagacacagagaagtctgagtgagaactatgaatcaccgcaccccctgagggtccttgctggaagaagcagactcaccgtattagttacctattgccatgtaatgaatgacacccgcttaaaataacagacatttactataaggtgttactgggacaataggggattttttaatatggattgtgtgtttgataatatggtatcaattttaagtatcttgggggtgatgacagtattagggttttgcaggagaaatgtccttattcttaaattatacatgacaaaatatttaggggtcaagtggcataatttccacagattactctcaaattgtttaacaaaatggttcttcaacagtaaatggataaacaaaacgtagtctattcgtgcaacacagtactatgtaaacaatgaaacttcatcaactactgaaaatgtaacaacatggacgaatctcatagaaacaatattaagtgaagaagccagacttgcagaaatacatactgtatgtttccattatctattgctgggcagcacaccaactccaaacttaatggcttaaaacaaaaataatcattttattatctctcatgaatctgtgaattactggactttaagagccactgatgtagtccatgaaccaaaacacatattcacggcagccactccacccagcacctcacacctgtgatgtttactggctgcccatgggatttgaacacctttagagtactgtgaaatttcccctaccttttgagtcctgcctccctaaagtggaaaccagaaagctcacttcccctagccttctttgaagctagagcacctaagttccaccaattaaattcatccacctaagacttcagttacaaaggggccacaggaggaaccagggtgtgggggttgcagagcaccttttactgtatttatttctctggcaaaggtgacagaagaagcaactgtcttttggggaagcggtgggttttttccttttttttttttttttttaagtgaagttcctgaaacagaagtggtttaggaggtgtcttcagtggtggctgcagcaacctccaggtcctaacaacagaaccaacagcagcgtctagaagccatggggcagcagcagtggtgtggctcatcagacctgctctctgcgtggtctgaccctgtacatacatgtgcctctcatccgtagttccagcatttcctctctaaagtctagttctgagagaaatttctttggtagacttttcaaagttttatcaaactcaaagagggaaccagcaagaatacaagagccttgatccaaagagtatttgaaaaacagagctgtatctctctgtgaggaaataatttctaggctagagattcaaaatggctaacgtgctagagggcaataaaatcataaccttggtgttatcttctttaccggagaaaaagagaaagccagcatcccttatcagctctctgctgattaacctctaatcgcacagggctggccgggttcgtcttaggcaaattacaatccctgaaacactctggttttgatcaggcagaattatgagcaaaggttcaagtgtgatataaaataatcaagcacgtacaattttgccttatttataattttgaaacacttttcctacacaatttctgaccttaaggggcagaattaaccaaataaaacttttcagaaatgctctaattcagttccactcattttatcgtctctatttggcctgttttagggctaaacccagaagcaaaatcttcttcaaaatgaatgtattgacagtcaccatgccagacttggagtacgaacaagagcatccttttacccttactgaaacctatgtggtcactaaaacatatatcaataatatttttaacctggacaaaattaatctagaaaattgagctactgttttttatttgtcagcttttaccacattgtgggtttgagacacaggtagttcttttgatagtacagcgttaatttaaaatataaaaatcatgccaaacacatctaattacttttagcttccttcacagtaggcggaggaaggtgaaaaattaagccttttgcgccacctagtggccaaatgggtagtggctgtctagtgagaaaaaacaaagatttgggggcgtgaaaaatagcttgacagtgttagtattctgaattcagggtatgaggttggaagaaggcaacaacaaaaaagaattttcagagaaactggtcacttaagtgcataggtacctgagagtgagcaattgttataactttgatatctcaataaccagagtgacaataaaacatttgaaaataaacataaagaaggtaacaattataagaaactttaggtgtttcagaagcaaatggttttttgttgttgtttgtttttaaaataatttaaaaacttgatgctatcagcacaaagcactaaaagttatcaaggtattaagtgagagcattctgataagaaaccaccgctagctgggcagattatgctaaagggaaagaaaaagttttttctctgtcttaagtgtagagtgtatattccaagatcaattttaaattacaaatcctctccttttttgcttattaattcgaattcatcattacgtgtgtgttttacagaaatacatatatagttgaatgacaattttgtttaaaactttccactttagttttaaaacgtagttaatcttatcaatacaatacatgaatgtatatccacactaagtttaccaccttaatttgagttttgcaaaaattaaatatggacaaaggtatatatatagaaagccacttagtgacccaataatctttctctctatgatacacttaagaattttttagacaataaaaagtcacttattaactagctcagtgaaaattagtccaaagtaacaaaatcatttgaggctgcaaaacaacaatatcactattgatattaggagtttttcaaagaggtaaaattctaaaatttttacatagagtgcaagctaagtagctaagtcaaatgacttgcaatatttttctgaaattcacaagagccaatagtttaaaaaaagcatctcataacatttaattaaaaatatacattttcatttaagtttgcttcccacaaaccactgacacactcattgacacagtgaatgagtctagtgacaagaaacaaatcctttttgttaggtcacttctaacactctgcctccaacaaaataaagaggacctattcaagctgtcagctattatatcatttaaagtaattttgggaaggaggccaggcaggaggatcgcttgaggccaggagttcaagaccagccctgggcaacataatgagaccctgtctctatgaataataataataaaattagtcaggcatagttcgatgtgtcatagtcctagatactctgaaggctgaggcaggaggatcacttgagcccaggagttcgaggttacagtgagctatgatcgcaccactacactccatcttgggtaatggggccagccaaacaccacagaaaaaactgcgactccacccccaccagctaaggtcaaa

SEQ ID NO: 206 - DNA, 1365 bp, Homo sapiens
ggccgcctgctcactagataacgcctacttccaaaagtggcctgcccagactattttggtagcaagcgtggaaatcagatctgagaatctcgggagcagccctggtgcccaattttctccatcacgcacacccttctcgcctctccctgcctcctgcctttccacttgcaccagttttcccaccccagcctcagggcggggctgcctcgtcacttgtctcggggcagatctgccctacacacgttagcgccgcgcgcaaagcagccccgcagcacccaggcgcctcctggcggcgccgcgaaggggcggggctgtcggctgcgcgttgtgcgctgtcccaggttggaaaccagtgccccaggcggcgaggagagcggtgccttgcagggatgctgcgggcgggagcaccaaccggggacttaccccgggcgggagaagtccacaccgggaccaccatcatggcagtggagtttgacgggggcgttgtgatgggttctgattcccgagtgtctgcaggcgaggcggtggtgaaccgagtgtttgacaagctgtccccgctgcacgagcgcatctactgtgcactctctggttcagctgctgatgcccaagccgtggccgacatggccgcctaccagctggagctccatgggatagaactggaggaacctccacttgttttggctgctgcaaatgtggtgagaaatatcagctataaatatcgagaggacttgtctgcacatctcatggtagctggctgggaccaacgtgaaggaggtcaggtatatggaaccctgggaggaatgctgactcgacagccttttgccattggtggctccggcagcacctttatctatggttatgtggatgcagcatataagccaggcatgtctcccgaggagtgcaggcgcttcaccacagacgctattgctctggccatgagccgggatggctcaagcgggggtgtcatctacctggtcactattacagctgccggtgtggaccatcgagtcatcttgggcaatgaactgccaaaattctatgatgagtgaaccttccccagacttctctttcttattttgtaataaactctctagggccaaaacctggtatggtcattgggaaatgagtgctcagggagatggagcttaggggaggtgggtgcttccctcctagatgtcagcatacactctttcttcttttgtcccaggtctaaaacatctttcctagagaaaacaaaagggactaaactagaaatataaagagccctatacatgacaggtgatcacgtactgaatgattttgaagtagtacaaacaataaaaattctcattccgcatcatcatgcggtccatgatgatgaggccg

SEQ ID NO: 207 - protein, 217 aa, Homo sapiens
MLRAGAPTGDLPRAGEVHTGTTIMAVEFDGGVVMGSDSRVSAGEAVVNRVFDKLSPLHERIYCALSGSAADAQAVADMAAYQLELHGIELEEPPLVLAAANVVRNISYKYREDLSAHLMVAGWDQREGGQVYGTLGGMLTRQPFAIGGSGSTFIYGYVDAAYKPGMSPEECRRFTTDAIAMSRDGSSGGVIYLVTITAAGVDHRVILGNELPKFYDE

SEQ ID NO: 208 - DNA, 23458 bp, Mus musculus
cccaagtctacatgtgaactgatcagagggcagggctagctcagagtggatcctcagcctcttagaagatgagtcgaatctacgaatacctgtgggtgcaaggaaagaaacctagggcacgaggggacccctcatgtatgttccttacatgcagagcgctgggtgtggccctggcactaagtctgctgttcatcctcctcctgcgcctggtggcggcacccctggtgctgctgctgattgtcggggtgctcgctgtgctcgcctatggcatctaccactgctggcaacagtaccaagtgtttcgggacaagggcgcctccatcacccaactgggcttcactaccaacttcagtgcctaccagagtgtgaaggagacttggctggctgcttgtgagtcccctgcccagctcctctgtccactggtcccctagggttgggtgaccctggcccttacccgggactgcctgccacctgctgtctccatgcagtgattgtcctggctgtcctggagggcatcttgttgcttatgctcattttcctgcgccagaggatccggatcgccatcgctctgctgaaggaagccagcaggtcagggcctgcctgtgagggggaggggaccttggccaggggtgctggcctgggtggggtaataggaacctaagaggagaaaggtagaaatggccaatgggtaacactgctaaattccagccttgtttatttgtttgtttgtttgtttgtttatgtagtgtgggggaagtgggtgtgttgagacagcctttgtctgtgcagccctggctgcccttggaactcattgtgtagaccagactggcctccagctcatagaaacccatctgcctctgcctcccaagtgctaggattaaaggtgcgtgttaccactatcaagagagttctagcctcttaggccctcagtttccctgtctggtttgtttcattgtccttgggaggaggtgagatttatttatttgtgttctatgtatgggtgtttggccagaatgcatgtctgcgcacacgcctggtccctgtggaggtcaggaggagaggaactggagttacagacagttgtgtgcctccacgtggattctgggaactgagctcaagtcctgtgggagaacagccagtgctcttcttaactgtggagccatctctccagccccaaggggttttgttttgttttgtttttgagacaggaacttatatagcctaaacgaatatcatggagcagctatgtaactgaggctgacctccaactctgggtcttcctgccccacaagatggtgatgatacagggtctcaggaagcacaggctgacctcactgtacagttgaagatgaccttaaacatatccttctacacctacctccagaatgctagggatatgggcatgtaccaccaggcttcttttatgctggggtgggggatctagctcagggtctcctgtgttaggcacaccctcctctgtcatcatacccaactcctgtcactcttgcaacataacccagactggtctcagactggtgacaaccctactttctcagcctctcgggtactggaattgaagtatgttcaccaccctcagactccctatcacagcagtctaaaccttgcaatggcacggtgaggactgcatgcgtgggtgtggactaagcacaggactctggaagcactgggagctgaggtgctcgctgggtcaaggggtgggaattgagataggaggagcagagatttccaaagccaccagggggcacacctttcgggggttctcttcccttacactccctgagtgtcccaggtgtcttctgtgactccagtctcccctatgggtcccttgagccttactcggttcacccagcaagagcctatagtgtatccctcctggaatcaggcgctgggtttattgatatggaagaggaaagctgtagttctgtttgtggtctggaaaacaaacaggcccgaggaagggtccagccatggtcagacctgggagcggatgcacagctctggggtcccagatgactactcttgtcttcatacagggctgtggggcagatgatgtcaactatgttctaccctctggtcaccttcgtcctcctggtcatttgcattggttactgggccgtgacagctctgtatcctttatacagctcccactagagagctctcaggggacagggtgtgggtagggacatgggacaggccccatgaggggatgtgacagaactgtattgcaagagtgagtttgggttgaatgccaaccctctgtgggagtgaacaatctgcatgagtcccaggggcagcatttaggggtgtcctgtagtggacggctggcattgtgcttttcttgactcatctctggatacctggccacatccgggcaaccccagtacatctactgggcgtccaacaccagtacaccgggctgtgagaacgttcctgtgaacatgacttgtgacccgatggtgagagggaatagggtgggtgctgagggggtcttgggggtcagttagcacagattttcgctagtgcacaaatacccgagagggccaggactctcacatgggtgaggcctcccttagttcgatagtctagttacccaatttgtggaaagtgaggtggagactggaaacgcaaagtaaagctggggaggttgaatatcaagtagaacctctctctgcctccaaggccattactagctcctcctccttgtcctgtggctcctcccactgctctataaatcggagctgatcctaatcctgtctcagaggtcctttaggagtttttatggcattaggtacatctagcgctgagcagaatgcccgtccactgatagagagccaagctggctggacttttccttttcattcacgtcctgggaacggagccccagacagtggccctgggaagtccacaggagggcctcctggaggaactgggaggcctgttggtacttcccagcacttgagaggtggaggatcaggcttcaacaccagtctctgtcacgcagctagtttgaggccagcctgagctacgtgacgccatctctaagaagcatagccaaaaaaaaaaaaaaaaaaaaaaaaaaaaaagccgctaatttcagcatcctgaaggttaagagtggtgattttaaattcaaggccaccctgggttacataaggaaactgtacctcaaaaaaccctacatacaaaaaagagaaggaaccactgcctggctttatttcaaacatcctcatacattcagaaaccatgaagcttttaaagtcatattttctgcatttatttagtttttaattgctcattttctgtgtgttgttatggagaattccaaacatatgcagaagtaacggtaggtcttgatttcctgaagccctcagcttcctgtaagaacgttcctcctcctttccctcttcctctttgcaaagttagaatttgagcccaaggcctcaggcatgagctacatccctaaccatccccggggcttaaactttaccttcctgccttcatctgtaactttttttctagagttctggtgaatcctagataaattctccattactgagctacatccccagcttctagaagttaaaaagggttttcttggggctggagagatggctcagcggttaagagcactgactgctcttgtgaaggttctgagttcaaatcccagcaaccacatggtggctcacagccatctgtaatgagatctgacgccctcttcaggtgtgtctgaagacagctacggtgtacttacatataataataaataaatctttaaaagaaaaaaaaaagctttaaaaaaaaggttttcagccgggcggatttctgagttccaggacaacctggtctacagagtgagttccaggacagccagggcgatacagagaaaccctgtcttgaaaaagccaaagggaaaaaaaaaggtttttcttccccacctcttttaaaatttttatatcttttattatttcattatttcatgcactttattattattttattttgtgcatacaggtgtctggcctacatgtatgtctatgcttagcattgtatttgctatctaaagaggccagaagagggcatcatatctcctggaactagagttatagatagtggtgagccatcacgtgggtgctgggaacggacctctggttctcttacaagagcagccagaggcatgccatagctggcttgcttttctttttctttcttcctcttctcctctttctttctttctttctttctttctttctttctttctttccaggctgacctgaaatgtattctgtagcccatactggcttcaaattcatggtgatctctctgcctcagtttccttaagtatcgggatcacaaggatgtcttagttaaggttttactgctgtgaagagacagcatgaccaaggcaactcttacaagaacaacatttaattggggctggcttacaggttcagaggttcagttcattatcatcaaggcaggagcatggcagcatccaggcaggcatggtccaggaagagctgagagttctccatcttcatctgaaggctgctagcagaatactgactcccaggcagctaggatgagagtccatacccacagtgatacaagtactccaacaagaccacaccttctgatagtgtcactccctgggccaggcatattcagaccatcctaagaagtaaagtaccacatagcacataggtagtctaaatacaaactgcaccataccacttaacatgtaaataagggaggtctttttgttttgttttaaagattgtatgtgagtacactgttgctgtcttcagacacaccagaagagggcttcagatcccattaccgatggttgtgagccaccacgtagttgctgggaattgaactcaggacctctggaagagcagtcagtgctcttaaccgctgagccatctcttcagtctaataaggtggatctcagacagcattttcttgcttgcttgtttgtttatctattcatagacagggtctgatgtagcccaggctggcttgaaacttgctgtgtggccaagaatgatcttgaacttctgatcctcctgtctctcccttccatgtgctgtgacgacaggtgtgccccaaagtgcagtttttcaaaagtgacctgtgtacattggtgttgtgactgtgtgtatgtcaatgtgaggttgtcagatgcccggggattggaattacagacctaccatgtgggtgctgggaattgaacctggttcactttggaagaatagccagtgctcttaaccgctgagtcatctctccagtccccactcagggtttgatgtggtggctttgtgcatggtaggcaagtactctatcagctgatatccttccccagcccctcaacagatcgctcagaaagcaggacagtgataaaaagttgtcttttgttcctgaagccccgagttctacactagaaatggggaggaaaggcggctgcaggggtggaggtgggcataaggataatgaaagcagggcatgaggctcaattttgtgtgtgagttttgtaggatgtgtgagatttggtgttcggtcccagcaaagcaaatgcatacacacacataccacacacacacatataacacaaactctcacacacaaacacaaatatgtaccacacactcatacccacacataccacacccacatacatgtaccacacatacatacacacatacaacacactcacacatgtaccacacatagatattcacatacaacacatgcacacatataccacacacatacatgtaccacacacacatacacacacacacatacatgcactgcacacacacacacacattccacagacatgtacacacatacagacaagcacatacatacagatacacacatgcatacacttacacatgcatgcatcacatgcgtgtgcacacacacatcacagacacatgcacacagacacacacacatgcatgctataactgtgtcattgttagagcccacaaagtcagtttaatatcaataaatacccacagtgtgttcagtgcacacaaggcttttccagaagcaggctgctgggaaagtaagagggagagggggtggaaaacatccacgcacgcacctcgcttgccttctggatagcttgtgccagtctggaaaccaggaagctgcttagtcacactacagcagcactgaggtggtctgagtctggaggccactaggaacagagaaggtcaaggatttgcctgcaactccgggcatgaacctgctatgtcctgtcacccccaggccccgttgaattcctcgtgcccaaacctcaagtgcgtcttcaagggctactcgaccacgggcctagctcagcgttctctcttcaacctgcaaatctacggagtcctggggctcttctggactgttaactgggtactggccctgggccagtgtgtccttgccggggccttcgcctctttctactgggcctttcacaagcctcgagacatccctaccttccctttgagctcagccttcatccgcacactccggtaagccaggggcagccgcctagggaagtgttagtcctagagataccaggggtcctggggtgcctcatctcacctaactaactgcctctgcagttaccacactggctcactggcgtttggagccctcatcctgtcccttgtgcagatagcccgggttatcctggagtatatcgaccacaagctaagaggtgagcaggtggtgggctgagcagccagagccttggaagggcaggcagacaggcagaagctggcggctaagcgtgagcttcctttgtccccaggatcccagaaccctgtggcccgctgcatcatctgctgcttcaagtgttgcctctggtgtctggagaagtttattaagttcctcaaccgcaatgcctacatcatggtgagcaaaacctccatccgtccctggctctgtgtccctcagcccgggctccaccatcactcgggcaagctcaccagaggtgtggctcagaccttccctgctcctcacagatcgccatctatggaaagaatttttgtgtctcggccaaaaatgccttcatgctgctcatgaggaatgttctcaggtcagaccgccatgccccagtggggtctcccacccacttctcccatcccaaagctggtctcagaaatgtcctgtgcttggtccagtaccatgccatcacctgccagcaccctcaccccagtctgtcctgacttctatgtagggtcgtcgtcctggataaagtcactgatctgctgctgttctttgggaagctgctggtggttggaggtgtcggtaagggtcaagaccagggtttacggggtcaggtgccccctggggtgcacgaagggggggtcctcagaagaacagcactgaccgcaggactctttcccacaggcgttctgtccttcttctttttctccggtcgtatcaaggggctggggaaagactttgagaaccccaacctcaactattattggctgcccatcatggtgagtgacacctctctctgccccacccacatccccagaggagcctagggctcccaatcagtcttgtctcttgcagacctccatcatgggagcctacgtcattgccagtggcttcttcagcgtctttggaatgtgtgtagatacgctcttcctctgcttccgtgagtgcccccctcccccaaccctccacccaccctcaagctcttaggcctccaggcttcttttagagactggttgcttgtagctttgtgagctaaaggagccagagggaatgtcttcagacattctaaggctagaggtttaggaaggaaagaagggaatacaccctgggcattctcagacaggggaaacttctcagacggaggcctgagtttaacacttcctaggaggtagtcagagtgtgtggtttttacttaggtttttttttttgggggggggggtcatgcataggggtgagacaggaacagactatagtacagactgacccggaactaagtctatagctaaggctgactcaaagtcatgatcttcctacctcagcccccaagtgctggaattcttgtgttttttgacctggtgacaatggtgaccatgatatagaagccagagccttgggcctgagaagcaggaatggccctacctcggtagcagtcccccagccatgcactaagcagtggacatgaatattttattgttttatgggttttgcttgttgcttcaattttatttatttacatcaggcctctctatgtattcttggctagctcctactatatagactaggctagatctaactcaaaccaatctcctggcctttgcctcccaagcaatagaatcatggatatgcgcaaccattctcaagacagagttgtgctgtggagacctcaggggcctttgtagtctaagtcctcccatgtccacattctaaatgtcgggattacagagaaagccaccatgatggtctggcatgtgatttttttttttttttgtcttgttatcaccctatgacatatacagttatttatcccactttgtgtgagaaaaacaggttatacagcctggtctacagccagccagggaagttgtatcaaactgcctgaagtggcccggacaggaaaccaggatgtttggtttatacaccccagattattttggggtacagtggggtgccattatcaggatccaccctgacggatctactttgcctctcagtcgaggacctggagagaaatgatggttcccaggagcggccttactacatgcccaaggcactcctgaagattctgggcaagaagaatgaggcacctacagggggaaagaccaggaagaagtgagagactcatcgtgacctggaaatgcagccctcctgtacagaagccctgccgtcaatgccttgagaatcacgattttgtagaaaacagattttattaaagactaatattttatattcttgataagtttatggctttattttcagtgaaaacttgcttcctttttttttttttttaattaaaatccaaattgctatcacacgattcaatacccagtaagaaaaacttgttcggtgactgaggccaggagactggggtgtaactcagctggtagagtttgcctagcatggaagggtccccggattctgtctatagcataagcagggctgggacacatgcctgtaatcggtacttgggaggtacaggcaggagcactggaatttccaagttatctgtgtctgtttagagacagaatttttctgtgtagccctggctatcctagaactcactctgtagaccaggctggcttagaactcaggaaggagggtggctcttttttcattcattcgtcgctttttttttttttttttttttttagcttttcaagacagggtttctctgtgtagcccaggctggcctcgaactcagaaatttgcctgcctctacctctgcctcccaagtgctgggattaaaggcgtgcgccaccacgcccagctgcttattatttttaacctagtgattctaatcagtgttagtcatgtgcttaagggcattggggtcatccactgggacgtggggtaccatgggcacactcctaaagaaaagtgcctttctctcccctagcagccatcaactgccaagatctcctcagctaggagtggggcttcccaaccctagggactcatacaaactaggaaggtactctaccaactgagtcatatgccatccctaacctgtctcttccacaaggggtcagtgcctttcatagccgccggttgctttaaaacacgccccgcccctttcgtcacgttctggcgttagagccagtcaaaaggctcacacagactggggccgcctctgggtcacatgctgatggactaattggagtcgcggcagcgcgggctgcggcccccaaggggaggggtcggagtgacgtgcgcgcttttaaagggccgaggtcagctgacggcttgccaccggtgaccagttcctggacagggatcgccgggagctatggtgggggcagacccgaccagaccccggggaccgctgagctattgggcgggccgtcggggtcaggggctcgcagcgatcttcctgctcctggtgtccgcggcggaatccgaggccagggcagaggatgacttcagcctggtgagccttgctgcacctgcagaggtggccactgcccagctcggccatccctccgcgtgacactcctgcccctccatcccctcccaacacctttgcttccttgggcccctggctcaactgttatggggtcctgcccctcatccctgaaggttccttctcccctcgcagcctctccttgctcaggagcctccaggttcggcccatactatcctctgggctcccacctcttgttctaggacacccttcacccctactcaggctccccattaccctctctcatgggaaccctggctggagccagtacctatcggtcttaggtaccttaaacctcgtgaagcttgtctgcattgaggtgtccttctgcgcaggtgcagccgctggtgaccatggagcagctgctgtgggtgagcgggaagcagatcggctctgtagacactttccgcatcccgctcatcacagccacccctcggggcacgctcctggccttcgctgaggccaggaaaaaatctgcatccgatgagggggccaagttcatcgccatgaggaggtccacggaccagggtaacaaaggctcccgggtggaaagagcgggtgctgggttgtatgggtgatcggggtagggagttgggggttcccttcatcaatggagcagagccgagcagaccccggggaccactgagctgctgggctggttggggtcaggggctcacagcgatcttcctgctcctggcatccgaggccagggcagaggatgacttcagcccagagatagaactttggggcttgagtccctaatgagttagggaaaccagaggatgaattttgtccatagtttctgtaactaagaaccaaggtactgaaaatgagaattatgtctcaggggaattagcaggaaataatgtcagagaaagaagaaacatggttctggtgccacattgaggtccccggggagaggcaggaagtaaacaacaacccgtacaattttctctctgctcttttttttttcttcttcttctaggtagcacgtggtcctctacagccttcatcgtagacgatggggaggcctccgatggcctgaacctgggcgctgtggtgaacgatgtagacacagggatagtgttccttatctataccctctgtgctcacaaggtcaactgccaggtggcctctaccatgttggtttggagtaaggacgacggcatttcctggagcccaccccggaatctctctgtggatattggcacagagatgtttgcccctggacctggctcaggcattcaggtttcaccctgtggataggaggagggcaagatcccatgaatcagattttttttcctgagtgggggcaccttagaaggatggcgttctggaagtttccatctcgattgtggagatggaactaccattgacgtctcacatggagactgtcaacagatctgtccttagcctgtgcagggaagaattgggtgccattgggcagacacgtacctatatcacaatgcccggtgcccagcagggtccatgagctcaggttagagagacgttcccaaggctgggtggacacctgcacttgtccagtggtgcattccacatgcatgtcctaagggacttccaggaaagggcagtggagagggtgtaagaaccaagcatgatctgtttatatgtttggacatgccatggtgaagcccatttctttgtatgctagccaaaaatttatttgagaacaaaaaaactaaggcaagaaaatcactgtgagttaaaggctagcctgggctacattgtaagttcaaagacaggctacctagagagataatctcaaaatggggaggaggactgaaaagatagtattgaaattggggacatttgcagccctcaggaggccagggcaggcagatctctgagttcaaggctagcctagtctacagagagcattcaggctactcacaagtaaccctgtgtagcatgcctacagttccagcatcaggcaatagaatgaggaggactgggagccaaatagtcagccttggctacatagagcattggaggccattgttattcaaataaatatttcgaatttagagagagatttttttcttttctattttttaagatttttgaggagtgtcattcaatgagggccttgtgcacaggcagcaagaactctaccaccaagctgagctatacctcagcctttttatatacttttaattttgagacagagtctcactatgtccccaggttagccttgaagtgactctgtagcccaggcaaaccatcttctgtgctcagcctcctgagtagctgggattacaggcctgccatgaaaaagcttcttaatttgggcagtgtctgtgggagaacaaaagggttccagtgtgtcgcactgggagctgccagcgctctgcctgagctccatggcagcacctttgcgacacccacttcctcttcttaacagaaacagcgggagcctgggaagggccggctcattgtgtgtggacacgggacgctggagcgagatggggtcttctgtctcctcagtgatgaccacggtgcctcctggcactacggcactggagtgagcggcattccctttggccagcccaaacacgatcacgatttcaaccccgacgagtgccaggtcaggagtccatggactgtacccgcccacaccaccgccttccccagctctggcttcctcagcctccccagcttctcctgttctctcccccacgcagccctacgagcttccagatggctcggtcatcatcaacgcccggaaccagaataactaccattgccgctgcaggatcgtcctccgcagctatgacgcctgtgacaccctcaggccccgggatgtgaccttcgaccctgagctcgtggaccctgtggtagctgcaggagcactagccaccagctccggcattgtcttcttctccaatccagcccaccctgagttccgtgagtgcctgagggtggagtgggggttggggggcgccccgtctgaacaagtcctggacagagcagagaccctcctccctctgactattgctctcctaggagtgaacctgaccctgcgctggagtttcagcaatggtacatcctggcagaaggagagggtccaggtgtggccgggacccagcggctactcgtccctgacagccctggaaaacagcacggatggaaagaagcagcccccgcagctgttcgttctgtacgagaaaggcctgaaccggtacaccgagagcatctccatggtcaaaatcagcgtctacggcacgctctgagccccgtgcccaaaggacaccaagtcctggtcgctgacttcacagctctctggaccatctgcagagggtgcctgaaacacagctcttcctctgaactctgaccttttgcaacttctcatcaacagggaagtctcttcgttatgacttaacacccagcttcctctcggggcaggaagtccctccgtcaccaagagcacttttttccagtatgctggggatggcccctgtccattctcttccaggacaacggagctgtgcctttctgggacaggatgggggaggggctccccctggagagatgaacagatacgaactcagggaactgagaaggcccggtgtcctagggtacaaaggcaggtactagatgtgattgctgaaagtccccagggcagagtgtcctttcagagcaaggataagcacacctacgtgtgcacctttgattatttatgaatcgaaatatttgtaacttaaaatttttgatgcagaaaaagcgtttgtggagtctgtggttctgtctgctcacgccttcccaattgcctcctggagagacaggaaggcagctggaagaggagccgatgtacttactgggaagcagaaacccctagattccatcctggctgctgctgtttgcaagtgtcaaagatgggggggcgtgtttatattttatatttctaagatggggtggcataggaaatagggaacagatgtgtaaaaccagatgggaaggacagtctgtgagaaaggagcaagcagttgctgcaggtgtgggagagcaaagcccttctccacgtggaaagagcccagatggacgctaagcatgttgggcacctgtaaccccgcactcgctggactgacggtgtagctcagtggtggagctagtacttggaacgcctaagactctgggttcagtccttgggggggggggtatgtgtttattgagaggaaggtgtacgtactgtaggtcagaggacagcttactggagttgtctctctccttcacgctgtgagtcctgtggaatgacctcaggtgtcagagttgggggcaggtgcctttgccagctgagccatcttgctgtctctgctttaatttaaaaaaaaaaaaaaaaaagaatattaaggtctgagggattcgggctgcgttcatttcaattagagggtcatatttcttttgacatttcttctctaagaaatgttaagatcatttgttctgtgtgatagaggtatagctccattgtatgtcagcagtgagggatcctgtgcattttatccagagtttgtacggtgttctaggggctgctagtgcagcccagtgctaaacacttcagcatgcacaaggcctcaatcagtgcatgcatgtgcacacacacacagacacacacgtacacactgacacaggtacacaaatacacactggcccacatgtacacatcgactcacaggtacacagacccactttgacacacatatacacagacacaaacgcactggcacacacatatacacaggcacacatggatagatggacacacgtgtacacatacacacacacacagaaatacaaatgttcaggttttctaaaaaaaaaaaaattagagacgtgttgacttcatttttagcaaaaatcctgtcatgtatcttaaagtggattgaacccactatgtagcccaggctggcctccaaatgggcatccttctgcctcagtctcccgagggctaggataacaggagtatgccatcacacctggctaatagaaattttcaaaattgtttgtttgaaggtgactcttactatattgcctaactgatctccagttcgtgaaatcctcctgcctcagaaccaggactgtcaatataacccaccaagacaggccaacattcacaattgattgttagtttgtggtctgaatcaaggtcttatactgtagcccaggctagcccggaatacacgatatctccagtgcttcagatcctcagttctaactaagcatggccacatccatgtttaactgcaaatttgatgttaccatggtttggtttggtttggtttggtttggtttggtttggtttggttttttggccattttttttttctcatgctgaggccttgtgctctcaagttggggagacagcatggagggtagctgcaactgtaaccccagttccaggggacctgacaccctctggcctccacaagtattaggcacatctgtggtgcacagacatacaatcaggcaaaatattcatacacataaaataaaataatttaaaacaaaagcaaaaatcaggacctaagaaaaaaatctattcctgattcttttatgttttgtttgtattttatcaagacagggttgtttctctgtatagccctggctgtcttggaattcactctgtagaccaggctggcctcaaactcagaaatcctcctgcctttgccttccaagtgctggaattaaaggcatgcgccaccacgctggctttgattgctgattttgccactcttttaatctgtcgcagcctaacctttctgtttgttcagtaggttgcttgatttttgtgccatccagacaaaacagcaggttgtcccgtgggatggcccttgaaggagtcacctaacatctccctccacctctgaaggtttggctgcattcagacacctctttgggagaataggggtgcctcatgttttccatgtgctgcccactgctcccccacgctcgcacagcctgccctccttccgtgtagagactgagcacagggctgaggtggtacagcaatctttgtaaggtttgctggtaaccctcccaaagcagcaatcccatcctgcatgcgttgtctgctaccatatttcatggagttgcaaatgagtggtttttacttttatttcttcctgaaataatttataacctgaaatccttcagttcaaagaaacacacacacacacacacacacacacacacacacacagagagagagagagagagagagatgcaaagaatctggatttgactcctagcacccacaaccatgtgtgactttaggacttcagttccagaggatctgatatcctcttctgacctctgtgggcaccaggcacatacatatatacatacatacatacacgcaggtaaaacatttatacacataaaactaaagtaaatctaaagcaaaaatgaagacttcaagaaaaagagagagagccttctctcctctgggctgtctgttagctggtgcacggtctgtacaggaaccacagcctgtgtgggctcgctctcccttaattgagcagttctgagtcagttgatgtaactcattgccctagtcagtaaaccacagtgttgcccaatgggatacatagaaaggcccttccctggcctgcagaggcagacagagggagtgagggaagatgcttgacagtaagacacctagcaggctgatgggttagctcagtacagtgcttgcttagcatgcgtgaggctcaggtacaatgtccagtccctgggctggtggtaattcatgcagatcactaaacagatcactgaacgaggaagaatggaggtcatgaccacagcaattgggacaccagtcccatgactatcgccacccaaaattgcatacctacctgccagtcttttgctttttatatgttgacccaggcctcgttccatagcctgggactcatgcaatcttcctgctcagcttcttgagctgagatcacaggcccagccccaatagtagaattggtgatagcaagattggcccagtggttacttgctatcaaggctgatgacctgagttcaaagctctgagcccacagggtggaaggagaaaactggctctagcaaggtgttctatgaccaccaaacatgccacagcatacctgcacccaccacccctacaaaacaaataaacaaataaatgtgaaactaaacaaaaagaggtagtggaagagagtgagactaggttgtgcctgcctgaaaccccagctcgcagaagatggcagaggcaggaagatcatgaaaacttgaagccagccttgtgtctgtagcaagttccaggctagtcagagctacacagcaataccctgttaatagaaagacagacagtggggctggagagatggcttggaggttaagagcactgactgctcttccaaaggtcctgagttcaaatcccagcaaccacatggtggttcacaaccacctgtaatgagatctgatgtcctcttctggtgcatctgaagacagctacagtgtacttacatataataactaaataaatctttaaaaaaaaattaaaaaaaaaaagaaagacagaatggtcaaaattaaaacacacactcacacatgcatgcatgcaagcatgtacacactcatatgtgtacttacatacactcatgcaggctcactgtacactcaggaggcatgcacacacacacacatagtggagattggaaacgatactcaccgtgcctgcctgtgagcctagtgaagcagaagcagcaggcagccacagagaatgacccatcatcacctgccttcttcaggccaacaaccctgatttccagtacatggtgcttaaagacctcctccttcctgggacaggctctggagcccatggtaaactagaccccttcatcatcacactagaagttcaggagatctagccttggggcccagagtttgcctcctcccactcctcccaccagtgctaggaatggagtctggggtctcactcaggcatgctgtgcaagtgctgaaccactgagccacatacctatccctgggtgcttttattctattttggttaggggacagtgtcacctactgggttactggctatgccacatccaggggataatgtgtatcatggacagatggttccgcagtccatcttaagagcacttgttcttgcagagcaccagcgagtgtggttcctggcatcttcttggtggttcacaactggctgtaactccagttccaggagctctaatgccctcttctgaccccttcaggcacacatgtgtggcacacatgtcagcaagccagtcacatgaatgaataagtaaatctaaaaacattttgaatacatttctgagctgagatggtgtctctgtaagtaaagtgcttatcatacaagcctgaaaacctgaattctgctccagcactcatgtaaaagccagtcatgacgagctggaaaatggtggcacacgcctttaatcccagcacttgggaggtagcacaaagcagatttctgagttcgaggccagcctgttctacagagtgagttccaggacagccagggctgcacagagaaaccctgtgtcttagtcagggtttctattcctgcaccaaacatcatgaccaagatgcaagttgggaggaaagggtttattcagcttccacttccacattgctgttcatcaccacaagaagtcaggactggaactcaagcaggtcaggaagcaggagctgatgcagaggccatggagggatgtttcttactgacttgcttagcttgctttcttatagaactcaagactaccagcccagagatggtaccatccacaaggggcctcccccattgatcactaatcgagaaaatgccttacagctagatctcatggaggcatttcctcaactgaagctcctttctctataactccagcctgtgtcaggttgacacaaaaccaaccagtatgccctgtatagtcaaaaaaccaaaaccaaacaaaaccaaaacagaacaaagacaccaggcctgtcatgagagcaacacataggtactgggaactaaattctggtcctgtggaagagcagccagtgcctataaacctccagccccaagatggtgttttaatgcaatggtttcaaagggcctagagagatgactcagtggttaagagcacttgttactgttgtgatcataaaaagagaaagcgctataagaatatgttctggcacggtgtgggggaaggggatgcgtctgtgggcctatgacaaggcatcccttccccctgagggaccagacacacaccggtatagtatagaatagagtttatttagggcatggagaggggagttaagagggtagcagagaggagaagtaggggccggccatggcctggtggagagaaggaggaagggaatggggagcaagaggtaagagagagagaggaggggccaagcagcctcttttatagggccatgcctacctggctgttgccaggtaactgtggggctggaatttagacagaattccaacagttaatttgccagaggacttgggttttggtttccagcacccacatgatgtccctcaactatctgcaactccagttttagaggaaccaactccatcttctggtctctatgggcaccaggcactcaggtggtacatttagatacaagcagacaaaacattcatagactcaacagagtttaaaaaacaagaagtaaaaacaaaacaaacaaacaaaaaaaaacccaaaacaaacaaacaaacaaaaaaaaaaccccacaagcacctgtgctgggtaaacatcttgtttttttttttttttttttttatttccttgtctttgatttcctgggaaaggaagcagaggccacaggcatgctagttaattgctgcaccactgatcactgggtaagctgctctttatctcggttctgggtgtaacggaaaaggctaactatctaaaaattcacacttgtatgagttggaggctagaagtctcatttcctgtgaccccgaatctttaagcaaagagcctagcggtgtgacagagcttcagacttagtttgaaatctgttggatcagagcccataaaagttacggagtagcagtatggcctccagcaagccggcaggatgatgctccctggagaatctaagctgccccagcaatcggaggcagggtggaaagcgccacagcgagcagcaggaactgtccaagcatgggtctctgaggatgtggtcccaaggttagcaccgtccccctccactgctgaatcaagagcgggaggccagcacttcagcccacctgggtttcagcaaggcatttgtccaataagattaggagaaatgtcctgggccatgtactggggcgggggcggagtgggagagcgagcgagggcaggagtggaggagggggatggggggagaggcaggtcaatggaggctgtgtgaatggctcagtagtgagcagtataaatgggagaggtttggtctcgaattctccagagagggagtaaaattaagcaagtgctgtcttcattttgatttgagataagttgtttacatttcctcattctctctttctttctttctttcctcctttcttcttgggaaagagtttagataagctctaaacctaaatattaacctcaggggctggagagatggctcagaagttaaaagcactggctgctcttccagaggtcctgaattcaaatcccagcaaccacatggtggctcacaacgatccgtaatgagatctgacaccttcttttggtgtgtctgaagacagttacagtatacttacatataaatcatatatttatcatatatatatatatatatatgtatatatatatatatatatatatatgaaatcatatatataccatatatgtatctcaaaactgaaattccctatatagcagaggctggccttaaactcctgatctgatcctttttttttgggggggggggtattgagacagggtttctctatgtagccctggctgtcctagaactcactttgtaaaccaagctggcctcgaactcagaaatccgcctgcctctgcctcccgagtgctgggattaaaggcgtgctccaccacacccagcctgatctgatcttcctacctacagggaataccccacccccacccgaacagtgttctgaagattagctagggcccacactatatcactgagctatatacctcaagtccctttgtatatatttttgagacagggtgtaggtaagtttcccaagctttgaccacactatgtagcccaggctagccttttgtttgcaatacccacaggcctcttagatagctgggcatagttccatgccttcaggcctggctcttcatactatttactgttcatcatcatcatcataaaaaaaaaaaaaaggctaggcaggggcatatggtcaggtggcacacctatgctcaaggccctggattattcaacctcagcacgcaaaaaatgtttcgagtcttctttttatagttgttcagtcctctcagaaaaaaaaaatcaagccagctgagcgagggttctctgagtggtcctgatggaaaatgcccacccgacccagcatccaccgtcacaaggccctttggagctccctcaccactgtgcttgcccctgaagtttaactggggagtgctggcaaacatctccatctcaggcatatttttagattttaatggtttaatgatgggcaataggcattccagaataggcatttccacttgagggtcacctgaccagggacaatgacatctaacattttcagagtcagcatgtactttggactaactggcaataatctgtttccttgttctttgggaaattaacaacaatcaaaagacagccctgtgggagacagccggacaccagcaccagctacctaagacctttcctcaaaacggaaaagcacaacaatagttaaagataactatggggggctccagagatggctcactggttaagagcactgattgctctcccagaggccctgagtcagttcccaacaaccacatggtgggtggctcacagccatctgtaataggatctgatcccctcttctggtgtgtctgaagacagctacagtttggtcatagaaataaataaatttaaagaaaagataattacaggtctggcctgcttagagacactgtccacctccttgggcagagctaaggaccctgcctgtgcctgttggggtggcagcattgtgataaacctgcatggccagaaaagctcccaacaaactgtggctggcacaactgcagaacttgacacttctcttaatgtttttaaggataatttcctttccaagtcattaatgtggcattcagtcaggcttccagttaatctcttcattatgcactttttaaatataatatttccatttattctctgagaattccatacatgcatacaatatagtttgattctatctacatcctgatccaactcagcccagatccccacatgtgcctgcctcccgcttctcctttttttttttttttttttttttttttggttttttgagacagggtttctctgtgtagccctggctgtcctggaactcactctgtagacgtcaaatcctcaaactcagaaatccgctgcctctgcctccagagtgctgggattaaaggtgtgtaccaccactgcccggcttgggcagcacctttttaagagcaacaccttttgggtaggtaaaatggctcagctagtaaaggcatttgcctccacacctgagactttagttcaatccctaagaccctcatggtgggagaagagatctgattgctaatttgtcctctgacttacacaagtgcccatatgaacacacacacacatttgtaggctgattctctataccctaccagccttctgttaccaatagctcctcagctaggtgtggagtcttgtgagtcacttccctgtgtacttatttatattctggaatttctagtcacatttttattcctcccaacccccactgctgggaattgagcccaagacctcccatataagccacacccctgtctcctgatagcaattttaaaagtcattttattttttagattgtgtgtgtgtgtggtatgtgcaatgggtgtgtgcaggtgaattcaggtgtccatggtggccagagacatcagatcatcctttaagaaaaggtcttttataacacagggtggcatagaacttcccatatagcccaggctagcctcgaataaagacaatcct

SEQ ID NO: 209 - DNA, 1263 bp, Mus musculus
tgaccagttcctggacagggatcgccgggagctatggtgggggcagacccgaccagaccccggggaccgctgagctattgggcgggccgtcggggtcaggggctcgcagcgatcttcctgctcctggtgtccgcggcggaatccgaggccagggcagaggatgacttcagcctggtgcagccgctggtgaccatggagcagctgctgtgggtgagcgggaagcagatcggctctgtagacactttccgcatcccgctcatcacagccacccctcggggcacgctcctggccttcgctgaggccaggaaaaaatctgcatccgatgagggggccaagttcatcgccatgaggaggtccacggaccagggtagcacgtggtcctctacagccttcatcgtagacgatggggaggcctccgatggcctgaacctgggcgctgtggtgaacgatgtagacacagggatagtgttccttatctataccctctgtgctcacaaggtcaactgccaggtggcctctaccatgttggtttggagtaaggacgacggcatttcctggagcccaccccggaatctctctgtggatattggcacagagatgtttgcccctggacctggctcaggcattcagaaacagcgggagcctgggaagggccggctcattgtgtgtggacacgggacgctggagcgagatggggtcttctgtctcctcagtgatgaccacggtgcctcctggcactacggcactggagtgagcggcattccctttggccagcccaaacacgatcacgatttcaaccccgacgagtgccagccctacgagcttccagatggctcggtcatcatcaacgcccggaaccagaataactaccattgccgctgcaggatcgtcctccgcagctatgacgcctgtgacaccctcaggccccgggatgtgaccttcgaccctgagctcgtggaccctgtggtagctgcaggagcactagccaccagctccggcattgtcttcttctccaatccagcccaccctgagttccgagtgaacctgaccctgcgctggagtttcagcaatggtacatcctggcagaaggagagggtccaggtgtggccgggacccagcggctactcgtccctgacagccctggaaaacagcacggatggaaagaagcagcccccgcagctgttcgttctgtacgagaaaggcctgaaccggtacaccgagagcatctccatggtcaaaatcagcgtctacggcacgctctga

SEQ ID NO: 210 - protein, 411 aa, Mus musculus
PVPGQGSPGAMVGADPWRGPLSYWAGRRGQGLAAIFLLLVSAAESEARAEDDFSLVQPLVTMEQLLWVSGKQIGSVDTFRIPLITATPRGTLLAFAEARKKSASDEGAKFIAMRRSTDQGSTWSSTAFIVDDGEASDQLGAVVNDVDTGIVFLIYTLCAHKVNCQVASTMLVWSKDDGISWSPPRNLSVDIGTEMFAPGPGSGIQKQREPGKGRLIVCGHGTLERDGVFCLLSDDHGASWHYGTGVSGIPFGQPKHDHDFNPDECQPYELPDGSVIINARNQNNYHCRCRIVLRSYDACDTLRPRDVTFDPELVDPVVAAGATSSGIVFFSNPAHPEFRVNLTLRWSFSNGTSWQKERVQVWPGPSGYSSLTALENSTDGKKQPPQLFVLYEKQRYTESISMVKISVYGTL

SEQ ID NO: 211 - DNA, 23877 bp, Homo sapiens
tgggcacctaaaatcccagctactcgggaggctgaagcaggagaattgcttgagcccagaggcggagtttacggtgagccgagatggtgccactgcactccagcctgggcaacagtgagactccatctcaaaaaaaaaaaattagacaatttatagcataagatgagatatccagttaccaatttaagtacagtaaggagtatctcaagtgaatacttcaaagtcaagtagatctgaatataaattctagcactttccagccctatggtcttgacccaactatgcaacctctctgaaccttgtttcctcatctttagaatgtaaatgacagtgaggtgcagtggctcacgcctgtagtcccaactgctcaggaggctaaggcgggagggtcacttgagtcctggagttggaggttacagtgagctatgattgtgccactgcactccagcctgggcaatagagtgagaaaccctgcctctaaaaaataaataagctaggtgaggtgactcacacctgtaatcccaacactttggggggctgaggtgggaggattgcttgagcccaggagtttgaggccagcctgggcaacacagcaaaaccccatctgtacaaaaaatttaaaaattagccaagtgtggtggtgcacatctatagtcccagttgcttgggaggctaagtggggaggatcgcttgagcccagaagttcaatgttgcagtaagctatgatcatgcagctgcactctagcctgggtgacagagcaagaccttgactcaaaaataagtaaataaataaataaatagataaataaatgacaaagcaaggctgcctggcaaagttgttgcaaggatggcagtaagtggctctgtaggcacataacagttgccaaaggaggtggggataaggtcagaaggcttcctggaggaggtgagatggagctggatttgaacagggagtcatggatgggatttctggtggaaagagagccctgagagagaggcacagtaagagcaaaggtacagattagaagggaacatgggctggatttggacaggagagcctggaagcctggccagggagtgtggatgctgtctctggggcagagcctctggagatgtctgagtcacaaagggacccagaaccctggagtgatgaagtccaggcagtgccacggtctccctggcactccactcgggtggagggtggatggaagggtgacagggtgttctaagagttgaggccagcggagaggagggtccaaaccaaggcacgacagggaggggaggcaggggatagactgggctccacaggacagaagcccatttgtgaaatcaaaagcagcccactgagggatgcaaggcccatcacccttccctcccctaagggcactgtggactgggagggggccagagaccctccaggcagagctcctggcccccaacccagcagcccggctctcccttccagctctgggacgctgctttccatggaccaacattactccaccggcgctcccagggatcaccaatgacaccaccatacagcaggggatcaggtaggcacctccctcccccacatcctggccacaccccttccacccacagccccatctgactctgtctccccaacagcggtcttattgacagcctcaatgcccgagacatcagtgttaagatctttgaagattttgcccagtcctggtattggattcttgtgtgagtcaccagattcccctcctcttgtgtccttgccttcttcctccctgatcctctaccccctcgcccaatgtctgaaacacaggctttggacagaggaggaggagccagagctccgaatggattccaagaccaacaggatttataagggaaagaggcctaatctggggacattgggtggtgtgtggaaaggcagggagggcctctgtaaggggaaagatttgaggggctagggctgaacctcactgtcctcaccctgcctacagtgccctgggggtggctctggtcttgagcctactgtttatcttgcttctgcgcctggtggctgggcccctggtgctggtgctgatcctgggagtgctgggcgtgctggcatatggcatctactactgctgggaggagtaccgagtgctgcgggacaagggcgcctccatctcccagctgggtttcaccaccaacctcagtgcctaccagagcgtgcaggagacctggctggccgcccgtgagtgtcctgcccacccccaagccaccagctgcccaaggactgccctgggccatgcccggccccagccctggccctgacctaggtctgtctgccccatcctctgcagtgatcgtgttggcggtgcttgaagccatcctgctgctggtgctcatcttcctgcggcagcggattcgtattgccatcgccctcctgaaggaggccagcaagttagggcctgcctgggagggagatggggttgaggacagcgtggacccaggagtgctaggggacctagggggtgctagagaggtggcagggagcctcagaggagaagggaggaatatagcacagtggtgaacactgctgtggctttgcttccccatctgtaaaatgggggtaacaataattcctgccttctagggttgtcttgaggattcaatgagtgcctggaatatgacataggccttctagaggggttggtgggagtggtggtggctgagtggaacggcaggaatccgggccaggaggggcagcagcttgctcccgatcaggaactgccacacacacctgccaagggatcacgcttgggggtgatcttcccttactccacccgaagctgccccaggtggcttctctgtgaccctagtttcctctaagggtcctgtgagcctgatttattcagttctgtttatccagtgagcacctacagtatgcctagccctgcaccaggccctgaggacacagatatgaaagacaatgtcactaaccctgttggtcccaccctgggggagtggggcaggccccagtgagggcagcggggtcagcccccccctttttttttttgagacggagtctcgctctgtcgcccaggctggagtgcagtggtgcgatgtcagctcactgcaaactccgcctcccgggttcacgccattctcctgcctcagcctccggagtagctggcactacaggcgcccgccaccatgcccggctaattttttgtatttttagtagagatggggtttcaccgtgttagccagcatggtctcgatctcctgacctcgtgatccgcccgcctcagcctcccaaagtgctgggattacaggcgtgagccaccgcgcccggccggggtcagccccttgagaagatggacagctggggcggtgccggttaacagctttgtctccctgcagggctgtgggacagatgatgtctaccatgttctacccactggtcacctttgtcctcctcctcatctgcattgcctactgggccatgactgctctgtatcctctgcccacgcagccagccactcttggagtcctgggggttgatggaaaacaaagcaatacttgccttgtagagtgccttggtgtcactggaagaggtgcccctttctctgggcagacacaccagcactgtgcctgaacagagttgaaagggtgcacacaggctgaatttcagccctctctgtgcagcaaacgatctgcacaagcacctaggaacaggtccctaaggagcgagtgacctgtggagacctcgtgtgatcatgctttccttgactcccctctgggtacctggctacatcggggcaaccccagtatgtgctctgggcatccaacatcagctcccccggctgtgagaaagtgccaataaatacatcatgcaaccccacggtaagaggaagcaggggacatggaggcgggactagtaggggtgaggggctgtaggggccacattcctcattgtgcagagaagactgaggccacagagggcaagacacttgtgcaaggtcacacactcaacccccagcagagctagaagaaaccagttcccagaatacctggtactcctgttgagccatccatcatgtggggagggaaactgaggctgggagagacagccctggataccaggacttactccacccctccccaggacattgctctgacttgaggaccatcaaccacttcaccctctgagtctcagcctactcctgtttgtttgtttgtttgtttgtttgtttgttttgagacagggtcttgctctgttgcccaggctggagtgcagcagtgcaatctcagctcactgcaacctccatcccccaggctcaagcaatcttcccacctcagcctcctgagcagctggaactactagcgtatgacaccacgccaggctaattttaagctttttgtagaggcaaggtcttgctgtgttacccgggctggtcttgaactcctggggttgccccgatgtagtcaggtacccaagcaatcctctggcttaacctcccaaagtactgggattataggagtgagccaccacatgcagctccattcctctgtaaaatgaggataattataatacccatccctggggtggctgagaagatgaaatgactttgggcacataaagtgcttagtacaatgcctggcacctgataagagctcaacaacaggttgaattgtattatattgttaagtcttactcccttggaacacagagccctaggtagtagccaggtgggactccctgcgggggacccgagagagaagctgcttccaaaattcccctgtgaggttccccgggagtggcgctgggctgctgggaatttactcttctcaaacctgtcatatcttcacctcgtctgagctgggaacatgagctgtgctgcaggcattagccccacccctattaaaaaggggaggtttggcaggcgcggtggctcatgcctgtaatcccagcacttaggaggccgaggtgggcagatcacctgaggtcaggagtttgagaccagcctggccaacatgacaaaaacctgtctccactaaaagtacaaaaattagccaggcatggtagcaggtgcctgtaatcccagctactcaggaggctgaggcaggagaattgcttgaactcgggaggcggaggttgcagtgagctgagatcgcgccattgcactgcagcctgggcggcgagactccgtctcaaaaaaaaaaaaaaaaaggtttatttacatgtacagaggacccactatgtgccaggcactgggtatacaaagcccaaaatgatgtggttctttttctttttcttttttttttcttttttaatgaaaaaaaggctgttacacaggctggagtgcagtgatgcgatcatggctcactgaagccttgatctcccaggctcaagtgatcttctcacctcagtctcccaagtagctgggactacaaacaagtgccaccatgcccggctaatttttttttttaagagatggcgtttcactatgttgcccaggctggtctcaaacaaatgggctcaagcaatttgcctgcttcagcctccaaaagtgttgggattatacacatgagcaactgtgctgggtatgacgtgagtgttgttttcaacttgcttgtgatctagcagtaaagactgacagaaggccgcgcgcagtggctcacacctgtaatcccagcactttgggaggccgaggcaggtgaatcatgaggtccagagttcgagaccaacctggccaatatggtgacagagtgagactccatctcaaaaaaaaaaaaaagattttttgattagccaggcatggtggcacacacctgcagtcccagctacttgggaggttgaagcaggaggattgcttgaacacgggaggcagaggttgcagtgagctgagattgagccactgtactccagcctgggcaacagagcgagaccctgtgtcaaaaaaaaatttttttggttatatttgctagaaagggttgctttttaatttgtgactttttactttttattatgggaatttttaaacatatgcaaaagtagagatgatagcacagtgagttccctgtacccagattccacaaccctcaactttttgctattcttatttcatctatatcctcacctataattttttttttttttgagatggagttttgctcttgtctcccaggctggagtgcagtggcgcgatctcggcccactgcaacctctgcctcctgggttcaagcaattatcctgcctcagcctcctgaatagctgggataataggcgtctgccaccacgcccggctaattttttgtattttcagtagagatgggatttcaccatgttggccaagctagtcttgaactcctgacctcaggcgatccgcccacctcggcctcccaaagtgctgagattacaggcataagccaccgcacccgcctcataaatttttttttctggagacttttaaggcaaattctggacatcatgccatttcacctgtacatgcatcgagatggatctcaacagataagaactgtttaaaagcatagccactatatcattatcacatctcacaaaattaacaataattccttaatatcatcaaatacccagcctgttcaatttgccggaaagggttttggtagacgttgcagaggctgctctggaatgggaatgctgagtgagtgccttcccctctgattgagactgagggagctgattatgcttatgctataggcagaccaaactgagtttgagcctggagatggaactctccgacagaacttgattcccgcagtccagagaagctacttcccacctgtcaactctgggaggggcaggagctactgggaatgggacgcccaggctccatactgaggcccccgatgcctgagcctactctatccccgtctaccctcccaggcccaccttgtgaactcctcgtgcccagggctgatgtgcgtcttccagggctactcatccaaaggcctaatccaacgttctgtcttcaatctgcaaatctatggggtcctggggctcttctggacccttaactgggtactggccctgggccaatgcgtcctcgctggagcctttgcctccttctactgggccttccacaagccccaggacatccctaccttccccttaatctctgccttcatccgcacactccggtaaggatggggcaggggcctggtcattgtaggcacgggggccccaggggtcctggagctgtctctgactgcataacaccctctgcagttaccacactgggtcattggcatttggagccctcatcctgacccttgtgcagatagcccgggtcatcttggagtatattgaccacaagctcagaggtgagtctggagtcggagtaggagtcaggagctggggaaggccattagggaggggcagtgaccaaacatgagccttcctcgctcccaggagtgcagaaccctgtagcccgctgcatcatgtgctgtttcaagtgctgcctctggtgtctggaaaaatttatcaagttcctaaaccgcaatgcatacatcatggtgagctacactgcaagcaaccctttgttctggtgccctttggtctagacacccccatcctggtccaggcagctcgccttggtaactctgacctttccacctccctcagatcgccatctacgggaagaatttctgtgtctcagccaaaaatgcgttcatgctactcatgcgaaacattgtcaggttaggctgctccccccccgctttgtggctccctcctctgatctcccacccaaggctggcttcgtgggtgtgctgtgctcagtcgggccctagacttagtttagtgctctgctcttgccatcttgaaacgtgaacaattttcattttgcaccagtccccacaaattacgaagccaatttcactctcagcattgccaggcctctcaccctcaacctgccctaacttctggcacagggtggtcgtcctggacaaagtcacagacctgctgctgttctttgggaagctgctggtggtcggaggcgtgggtaagggaccagaagctgtggggacagagggtaggggtgctgggcagctgaagaggtggcctcagaggtgcagcactaacccccagaattattccacaggggtcctgtccttcttttttttctccggtcgcatcccggggctgggtaaagactttaagagcccccacctcaactattactggctgcccatcatggtgagtgactcccctctctgctgctccacccccaactccccagaggaacccaataaccccaacgggtcatgtcttccagacctccatcctgggggcctatgtcatcgccagcggcttcttcagcgttttcggcatgtgtgtggacacgctcttcctctgcttccgtgagtgacacccccagccacctgtccccaaccttaaagtactgagccgttcaagcatttttttttttttttggagatttggtgcttctagaaacaatgcctttgtgagctaaacgaaccagagggagcttcttgtgacatcctgaggccaggcgtttagggaagaaggaagagagtgagcccccaggccggtaggctctccaaagaaggagcattctgatggagaggtctctgctatcttccctaagaaatctcgggtagaagttagccattagaggccaggcatggtggctcacgcctgtcatgccagcactttgggggaccgaggtgggcagatcaccctgaggtcaggagttcgagaccagcctggcccacatggtgaaacccctctctactaaaaatacaaaaaattagctgggcgcggtggcgggcgcctgtaatcccagccacttgggaggctgaagcaggagaatcgcttgaactcaggaggcggaggttgcagcgagccgagattgcgctactgcacttcagcttgggcgacagcaagactccgtctcaaaacaaagaaaaaagattaaaaaaaaaaaagagccattagagagacttcccagcaggtggctgtagcggcaggggattttcttactctacagcatgcatccattcagggtttgccagtctcctcctaagcgactgacatgcattttttccgctaattcttatcatcgctctatgcaacataatattcccgaccccacttcacaggaggaaactgagattacataacctgcccgggggtaagggtggtggtgcagcttggattccaaatcccgcaggcagcttgcctcccagtccccgatttcctggccccagggtccgctctaaccggtctctgttgcggctcagtggaagacctggagcggaacaacggctccctggaccggccctactacatgtccaagagccttctaaagattctgggcaagaagaacgaggcgcccccggacaacaagaagaggaagaagtgacagctccggccctgatccaggactgcaccccacccccaccgtccagccatccaacctcacttcgccttacaggtctccattttgtggtaaaaaaaggttttaggccaggcgccgtggctcacgcctgtaatccaacactttgagaggctgaggcgggcggatcacctgagtcaggagttcgagaccagcctggccaacatggtgaaacctccgtctctattaaaaatacaaaaattagccgagagtggtggcatgcacctgtcatcccagctactcgggaggctgaggcaggagaatcgcttgaacccgggaggcagaggttgcagtgagccgagatcgcgccactgcactccaacctgggtgacagactctgtctccaaaacaaaacaaacaaacaaaaagattttattaaagatattttgttaactcagtaaatctgtgactcattctctccacgacgacaggcggcctttttttttccgcgcccggctctttaaaatcggccccgcccctgtgacgtgtcctggtgccgcggccaatcaaaaagcccaataaggatggtgccagtcccttcttcaccccagccagtccgcttcccgttcgggtcacgcgctccgggcctccaagagggcctccaagagggccaatcggaagggcaagcttcgagatgctgcgtgatcacgtgggaggagatgagctacttgaagaccaattagagtccgggaagcgcggcggggcctccagaccggggcgggcttaagggtgacatctgcgctttaaagggtccgggtcagctgactcccgactctgtggagtctagctgccagggtcgcggcagctgcggggagagatgactggggagcgacccagcacggcgctcccggacagacgctgggggccgcggattctgggcttctggggaggctgtagggtttgggtgtttgccgcgatcttcctgctgctgtctctggcagcctcctggtccaaggctgagaacgacttcggtctggtgagtcaccctttgcatagccccatccccgacccgcgcaggtgatcgacacctagtgtcccccggaacgcgggcggctgagccgactttccgcgacaggacccttttctttctcccagaccccgtttcctcctaccgctcccagcccctctccctctccgggtccccgtccttctcctcattcgagccccttcctcttttggggtccccttccctccctgaaggcgccttctcctttcgtagaccctcccctgctccgagcctccagcttcgctccaaactccccttcgtgttcctctttcttgttctgggaccccatcccctactcgggatccccattagatcctccctctcccatcggaacgtgggttcctaaaacccccaagacaagtttgtctttgttgacccttcctcctcccatgacaggtgcagccgctggtgaccatggagcaactgctgtgggtgagcgggagacagatcggctcagtggacaccttccgcatcccgctcatcacagccactccgcggggcactcttctcgcctttgctgaggcgaggaaaatgtcctcatccgatgagggggccaagttcatcgccctgcggaggtccatggaccagggtataaagatgtctgggtgaaagagccggtgctaggttggatgggtgggcagcccaatgagcccaagggccctgaggataggggaacttagagggttggttgcctgagtccctgaggggtagagggaacccgagaagggcaagtgtctaggacagtgatctggaaattgggatcaccaaggagttggacattcacttagcaaacatttattgggtactatatacctataccaggcactattttaggtttcatgaatatagccacgaacaaaacagatcaaaaatctctgccctcaggatttaaattgtactggaaggagacagacaagcataataaacaagtaaacttttttgtctgttgcaaggtgataaatgcaatggagaaaaataaaacaggacaagaggtatagatagtgcaagtgttggattgcaccctgggaccatcggaaggcctgaggtccctagcagaaggtgggaaattaacgggaagtggtagaaagggtacctgcagagtgctcactctgggtttcttcctccaatttttttcaggcagcacatggtctcctacagcgttcattgtcaatgatggggatgtccccgatgggctgaaccttggggcagtagtgagcgatgttgagacaggagtagtatttcttttctactccctttgtgctcacaaggccggctgccaggtggcctctaccatgttggtatggagcaaggatgatggtgtttcctggagcacaccccggaatctctccctggatattggcactgaagtgtttgcccctggaccgggctctggtattcaggtctctgtcctaggagataggtggagggggctgccttgtggagagtctgagggatacccccaaatggactcctttccaaggggaagattctctgaagtcagattttctggcttgggtgggattccttgaaagacagggcatcctggtaggaacacattatcaggagaagagggaactctgccattggcttcccatttggcattgtcaacaggactgcgttagtccatgcaataccctcatgcaaagtagaaaaaggcactgcctctttggacagacacaagcctgtgccagggtgcacagcttggcgagtgagcacaggttgggtttaagctctcatgcaccctgtggctgggcccctggtgcacatgtccagctgtacaccctgggagagcttcttaattcaaacagggtgtgtatttatgggatctgactggaaccctcagtgagcaagggctgaactcaaggggaccatacatgtgattgcatttgggaagtggtgggttctctgtccctgcctctgagcccctagagtctccttctgtgacacccagttccctttcccacagaaacagcgggagccacggaagggccgcctcatcgtgtgtggccatgggacgctggagcgggacggagtcttctgtctcctcagcgatgatcatggtgcctcctggcgctacggaagtggggtcagcggcatcccctacggtcagcccaagcaggaaaatgatttcaatcctgatgaatgccaggtcaggagtccatgagatgttccctacccatttgaccctccctgccctccagaacatcatttcacgcacagacccagggtctgactgctccactcagtgccacacacccttgctcccctcggggacagggcattttccctgttccctccctgaggtcctgtcctctcccctcagccctatgagctcccagatggctcagtcgtcatcaatgcccgaaaccagaacaactaccactgccactgccgaattgtcctccgcagctatgatgcctgtgatacactaaggccccgtgatgtgaccttcgaccctgagctcgtggaccctgtggtagctgcaggagctgtagtcaccagctccggcattgtcttcttctccaacccagcacatccagagttccgtgagtgcctcatgggtggggtcagcagggagagccctgtgtctagacaaggcctgggcagagaccctctctccctgactctcctgctctccccaggagtgaacctgaccctgcgatggagcttcagcaatggtacctcatggcggaaagagacagtccagctatggccaggccccagtggctattcatccctggcaaccctggagggcagcatggatggagaggagcaggccccccagctctacgtcctgtatgagaaaggccggaaccactacacagagagcatctccgtggccaaaatcagtgtctatgggacactctgagctgtgccactgccacaggggtattctgccttcaggactctgccttcaggaacacgggtctgtagagggtctgctggagacgcctgaaagacagttccatcttcctttagactccagccttggcaaaatcaccttccctttaccagggaaatcacttcctttaggactgaaagctaggcgtcctctcccacaaaaaagtcctgccctcatctgagaatactgtctttccatatggctaagtgtggccccaccaccctctctgccctcccgggacattgattggtcctgtcttgggcaggtctagtgagctgtagaattgaatcaatgtgaactcagggaactggggaaggctgagcctcctctttggtgttgcggtaagataaccgacagggctggtgaaagtccccagatggcaggatatttggtttcagagtaaggactaggtgcaccaccatgactgactatcaatcaaaatgtttgtaacttaaaatttttaatgaaggataatgaatatttgtagagtctctatggttctgtcaatgcacatcttcgtgtctgttttcctcatgtatccttgtgagcctgggtgagttctggggagagacctgatgtgcgtactgcctgtgaaaatctgactttggcaaatcaaatcctcttttccttttgacatgccctctttttttgttgttgctttttttgagacagggctcgctctgtcacccaggctggagtgcagttgcacaatcacggctcactgaagcctcaacctcctgggctcaagtgatcctcacgtctcagcctccggagtagttgggactacaggtcagtgacaccatgcctggttaatttttttaatttttattttcagtagagacaaggttgcgctatgttgcccaggctggtatggaactcctgtgcttaagcaatcctcatgcctcagcttcccaaagtgctgaggttacagctatgagccaccgcacccagcctacattccttcttatcaccgagaaacaggttgatcttcacaggtgtaatgagtatgaagggagtgccataagatattttttattttttatttatttattttttaatttaatttttttttttttgagatggagtcttgctctggcacccaggctagagtgcagtggtgcgatctcggctcactgcaacctctgcctcccaggttcaagcgattcttctgcctcagcttcccgaatagctgggattacaggtgcccaccaccacacccggctaatttttgtatttttagtagagacggagtttcaccatgttggccaggctggtctcaaactcctggcctcaggtgatccacccgcctcggcctcccaaagtgttgtgattacaagcatgagccatggtgccggcgggctgatttttttaatttttagtagagacaaagtctcactatattgcctaggttggtctcaaactgctgagctcaagcaatctgccggccatgttctctcaaagtgctgggattacaggcttgagcccctgcacccagcctgtaagatattttaaaatccacacttggccaagcgtggtggctcacacatataatcccagcactttgggaggccaaggtgggcggatcacaaggtcaggagttcgagaccagcctggccaatatggtgaaatcccatctctactaaaaatacaaaaactagccaggcgtgttggcttacacttatagtcccagctactcaggtggctgaggcaggagaatcacttgaaccaggaggcggagtttgcagtgagctgagatcacagcactgcacaccagcctcggcaacagagtgagactccgtctgaaaaaaaaaaaatccacgctgttttatatttctaacatggggtaggataccatcctccatgaaatagggtgcaagtgtgtgaaatgcagatgggaatcctgtcccagctagcctgacagagaagtgagcacttcctatggcaaattatgtaagaaaatattccccaggcagatgcttatgaaaagaatctgttcagcctgcaggtaagtgggagagcccttgctcaaaaaaaaaaagaaaaagaaatagtggaagacaaaaaggaaaggacactatgaatgtctgacccatgaactactacctgttagaaacagaagtgctgggaggcttgagagacagacactaccttcctggctaggtgtggtggctcagatctgtaatgctagcacttcgggagaccaaggcaggatgatcaaattaaagggcatcctgggcaacatggcaataccccatgtctaaaaaatttaaaaattagccaagcatggtaacgcacacctatagtcctagctacatgggaggatggcttgatctctttgaccccaggagttcgaggcagtagtgagctatgattgcaccactgcacaccaacctaggtgacagagtgagacctcatctccaaaaaaccaaaccaaaacaaaaaaccttcaagaaagaaaaaaagcttgaccttccctccctcactctttacagacccatggaatctgaagctctggtgttggagccaccaggcattaacaagccttctgggtgattcgtaatacgtttaagtttgaaaaccagggtcagaacttttaaacaagtgcaagtgtccagctaaaatgaattatatgtacgtcaaagttgcagaaatagttaaagaaccttttttttccagctttttttttttcttttaatacacagggaagggtcaggtgcagtggctcacgcctgtaatcccagcactttgggaggccgaggtgggcggatcacaaggtcaggggttctagaccagcctggccaacatggtaaaaccccatctctactaaaaatacaaatattagccatatgtggtggcacacgcctgtagtcccagctactcgggagcctgaggcaggagactcacttgaacctgggaggcagaggttgcagtgagccgagattatgccactgccctccagcctgggcgacagagcaagacttcatcttaaaaaaaaaaaaaatacacaggaaagattgggacaagtggcaggagactgaaaggggaaagagcttgtttgtactaatgggacaaagtgggccgactctgggcacactgcttatgagttagctctactctgtgaggaaattttttttttttttttgagacggagtcttgctctgttgcccaggctggagtgcagtggcgcaatcttggctccccgcaacctctgcctcgctggttcaagcaattcccctgcctcagcctcctaagtagctgggattacaggcgcctgccaccacgctcggctaattttttggtatttttagtagagacccggtttcaccatgttggccagactggtctcgaactcctgacctcaggcaatacgcccgcctcggcctcccaaagtgccgggattacaggtgtgagccaccccacccggccaaggaaatatttaaaaaataaaataaaataagttatttaaaaattggggcaagttggctgggcacggtggctcacgcctgtaatcctagcactttgggaggctgaggaagggggatcacttgaggtcaggagttcaagaccagtctggccaacatggtgaaacactgtctctactaaaaattcaaaaaattagccaggcattgtggcaggcacctacaatcccagctactcaggagactaaggcaggagaatcgcttgaacctgggagacggagattgcagtgagttgaaatcatgccactgcactccagcctgggctatggagcgagactctccctcaaaaaaaaaaaaatcggggtaagtgttatcaatctaaaaaataataattaaaaagttcagaatctaggccaggcgctgtggctcacacctataatcccagcactttgggaggcagaggcaagcgaatcacctgaagtcaggagttcaagaccatcctggtcaacatgacgaaaccccgtctctaccaaaaatacaaaaattagctgggtgttgtgggtcgcgcctgtagtcccagctattcaggagactgaggaaggagaatcgcttgaacccgggagcgagaggttacagtgggccaagatcataccattgcattccagtctgggagacacagcgagactgtcttaaacaaacgaacaaaagctgagaatctagtgttgttgctttttacagatggagtcttgccatgttgcccaggttagattcagactgaagttcaagggatcctcctgcctcagcctcctagagtagatagagttgggactgcaggcacataccactgtaccaggcttagaatctagtttaaagagtttatccaccggctctccctccctctccctctgtctccctctccccacggtctccctctcatgcggagccgaagctggactgtactgctgccatctcggctcactgcaacctccctgcctgattctcctgcctcagcctgcccagtgcctgccattgcaggcacgcgccgccatgcctgactggttttggtggagacggggtttcgctgtgttggccgggcaggtctccagcccctaaccgcgagtgatcccgccaacctcagcctcccgaggtgccgggattgcagacggagtctcgttcactcagtgctcaatggtgcccaggctggagtgcagtggcgtgatctcggctcactacaacctacacctcccagccgcctgccttggcctcccaaagtgccgagattgcagcctctgcccggccgccaccccgtctgggaagtgaggagcgtctctgcctggccgcccatcgtctgggatgtgaggagcccctctgcctggctgcccagtctggaaagtgaggagcgtctccgcccggccgccatcccatctaggaagtgaggagcgcctcttcccagccgccatcacatctaggaagtgaggagcgtctctgcccggccgcccatcgtctgagatgtggggagcgcctctgccccgccgccccatctgggatgtgaggagcgcctctgcccggccgagaccccgtctgggaggtgaggagcgtctctgcccggccgccccgtctgagaagtgaggagaccctctgcctggcaaccaccccgtctgagaagtgaggagcccctccgcccggcagctgccccgtctgagaagtgaggagcctctccgcccggcagccaccccatctgggaagtgaggagcgtctccgcccggcagccaccccgtccgggagggaggtggggggggtcagccccccgcccggccagccgccccatccgggagggaggtggggggtcagcccccccgcccggccagccgtgccatccgggagggaggtgggggggtcagccccccacctggccagccgtgccgtccgggagggaggtgggggggtcagccccccgcccggccagccgccccgtccgggaggtgaggggtgcctctgcccggccacccctactgggaagtgaggagcccctcagcccggccagccaccccgtccgggagggagatgggggggtcagcccccccacccggccagccgcccggtctgggagggaggtgggggggtcagccccccgcctggccagccgccctgtccgggagggaggtgggggggtcagccctccgcccggccagccgccccgtctgggaggtgaggggcgcctctgcccggccgcccctactgggaagtgaggagcccctctgcccggccagccgccccgtccgggagggaggtgggggtgtcagccccccgcccggccagccgccccgtccgggagggaggtggggggggtcagcccccccgcccggccagccgccccgtccgggaggtgaggggcgcctctgcccggccgcccctactgggaagtgaggagcccctctgcccggccagccgccccgtccgggagggaggtgggggtgtcagccccccgcccggccagccgccccgtccgggagggaggtggggggggtcagcccccccgcccggccagccgccccgtccgggaggtgaggggcgcctctgcccggccgcccctactgggaagtgaggagcccctctgcgcggccaccaccccgtctgggaggtgtgcccaacagctcattgagaacgggccaggatgacaatggcggctttgtggaatagaaaggcaggaaaggtggggaaaagattgagaaatcggatggttgccgtgtctgtgtagaaagaagtagacatgggagacttttcattttgttctgcactaagaaaaattcctctgccttgggatcctgttgatctgtgaccttacccccaaccctgtgctctctgaaacatgtgctgtgtccactcagggttaaatggattaagggcggtgcaagatgtgctttgttaaacagatgcttgaaggcagggtgctcgttgggagtcatcaccaatccctaatctcaagtaatcagggacacaaacactgcggaaggccgcagggtcctctgcctaggaaaaccagagacctttgttcacttgtttatctgctgaccttccctccactattgtcccatgaccctgccaaatccccctctgtgagaaacacccaagaattatcaataaaaaaataaatttaaaaaaaaaaaaaaaaaaaaaaaaagagtttatccaactgcaaatgttgaggaagtggcccgtctagagctgaagattccaaagaatattagtctatgttccaaaagtgtagaagtttggaatcgcttatataaacagaaagtttatggaaacttagaatttcaacattgttctgtgttcacaattggtgggttcttggtctcattgatttaaagaatgaggccgcagaccctcacggggagtgttacagttcttaaatgcggcgcctctggagttgtttgttcctcccggggggttcgtgctctcgctagcgtcaggagtgaaactgcatacccctgcggtgagtgttacacctcataaaagtagtgtggacccaaagaacaaatagcaataaaatttattgcaaagacggaaataacaaaccttccactctatggaaaatgaccagagcgggatgtcactactcactcaggcagcctgcttttattcccttatctggccccacccacatcctgctgattggtccattttacagagagctgattggtccgttttacagagagctgattggtccattttgacagggtgctgattggtgcgtttacaatccctgagctagacacaaaagttctccatgtcctcactagattagctagatacagtgtcgattggtgcatttacaaaccctgagctagacacaggatgctgattggtatatttacaaaccttgagctagatacagagtgccgattggtgtatttacaatcccttagctagacataaaggttctccaagtccccaccacactcaggagcccagctggcttcacccagtggatcccgcactggggccgcaggtggagctgcttgccagtcctgccccatgcgcctgcactcttcagcccttgggaggttgatgggactgggggccgtggagcagggggtggcgctcgtcggggaggctctgcagcacaggagcccacggcggggttggggctcaggcatggcgggctgcaggtcctgagtcctgtcctgtggtgaggcagctaaggccccgtgagaaatcgagcacagcaagctgctggcccaggtgctaaacccctcactgccctgcccggggcttgtgggccagcctgccgctccaagagcggggcagccgagcccacgcccacccggaacttgcgctggcccacaagcgctgcgtgcagccccggttcccgcccgcgcctctccctccacacctccccgcaagccgagggagccggctccggcctcggccagcccagagaaggctcccacggtgcagtggcgggctgaagggctcctcaagcgcggccagaatgggcgccaaggccgaggaggcgccgagagccagcaagggctgcgagggctgtcagcacgctgtcaactctcagttctatggtaaggcttattgcatagttacaatgatctgattagtcaattttttttttcttttttggggggtgggggaaggtgttttttacattccacactgaagatgcaatagtcatggggtcttgggtgccatctggtctgagtcaggtacaggacaataaaggaggcagttaatctacaacaaagatcagtgattggaaaggaggtctcattacagaacaagagcaatgaggaggagagtctgtaagaagcagaattgcaaacatgctacatgactcagtctccaaggcttaacttccatcttggcataaacttagagtcctgaagttttgttttctttttacggtggactttgcacatcattgcctggtgagtgcccgctggatcagcagccaaattctagcatgaaaccctttccccaacatcccctttcaccttgcatggccctccttcccttcacacattgatccccactcccagcccctttgcttaggatcaaaccagctcaagctctctctgtcttctcagctgtcccttaaataagggaaagagacagtaacaatgaacactgacctgaacagcaaataccagggaccagggaccatggatacttttttgctaatgtaatccttccaaccaaaagtcatgacaaggagggaataggaaaaagtatttttttttttttttgagacagggtcttactctgtcacccaggctggagtgcagtagcatgatcacagctcactgcaaccttgaccacctgggttcaagcaatcttcccacctcagcctcctgagtagctgggactacaggcacttgccaccaagcccagctaatattttcatttttgtagaaacagggtcccactatgttgcccaggctggtcttaaactcctgggctcaagtgatccttgaccaccccacccgctcggcctcccaaagtgctagagttacaggcctgcccacccatagccatctaataatttttgcccaagaaaggattgggaaggaagatcaaagcaatggcttggacatctttccaacaacaacaacaacaacaacaaaaccacaacagactcaaattaccatagtagaagtataggtcttccttttcctaatactctgggatttttttttttttttgagacagagtcttgctctgttgcccaggcaggctggagtgcagtggcgtgatctcaactcactgcaacctccgtgtcccaggttcaagtgattctcctgcctcagcctcctgagtatttgggattataggtgcccaccaccacacctggctaattttttgtatttttagtagagatgggttttcaccatgttgaccaggctggtctctactaaaaatacaaaaattagctgggtgtggtggcatgcccctgtagtctcagctactcgggaggctgaggcagaagaatcgcttgaacctgggaggcagaggttgcagtaagccgagatcatgccactgcactccagcctggtgacacagtgagactctgtcccaaaaaaaaaaaaaaaagaggccgggcgcggtggctcatgtctgtaatcccagcattttgggaggccaaggcaggcgaatcacctgaggtcaggagttcaagaccagcctcaccaacatggagaaacccagtctctactaaaaatacaaaattaggctgggcacagtggctcacgccacccagcactttggggaggccaaggcgggcggatcacctgaggtcaggagttcaagaccagcctggccaacatggtgaaacccccgtctctactaaaaatacaaaaattagccaggcgtggtagtgcatgcctgtaatgccagctactgaggaggctgaggcaggagaatcgcttgaacccgagaggggaaggctgaagtgagccgagatcacgccactgcactccagcctcggcaacaagagcgagactctgtctcaaaaaaaaaaaaaaaaaaaaaaagctggccagaggcggtaattacatgcctgtaatcccagtcccagtactttggaaggccaagacgggcagatcatttgagcccaggagtttgagaccagcctgggcaacatggcaagacctcatctctacaaaaaatttaaaaattagctggggcagtggcccacacctgtagtttcagctacatgggaagctgaggtgagagggtcacttgagcccaggaggtagaggctgtagtgcaccaagaccgcaccactgccctcaaacctgggcgacagggcaagaaacttgtctcaaaaacaaacaaataagaaacccacagcacattaggtcaaatacttttataaaaaatttttttaggccgggcacggtggctcatgcctgtaatcccagcactttgggaggccaaggcgggcggatcacaaggtcaggagatccagacctcctggctaacacggtgaaacactgtctctactaaaaatacaaaatattagccgggcgtggtggcgggagcctgtagtcccagctacttgggaagctgaagcaggagaatggagtgaacctggaaggcagagcttgcagt

SEQ ID NO: 212 - DNA, 1803 bp, Homo sapiens
cacgcgctccgggcctccaagagggcctccaagagggccaatcggaagggcaagcttcgagatgctgcgtgatcacgtgggaggagatgagctacttgaagaccaattagagtccgggaagcgcggcggggcctccagaccggggcgggcttaagggtgacatctgcgctttaaagggtccgggtcagctgactcccgactctgtggagtctagctgccagggtcgcggcagctgcggggagagatgactggggagcgacccagcacggcgctcccggacagacgctgggggccgcggattctgggcttctggggaggctgtagggtttgggtgtttgccgcgatcttcctgctgctgtctctggcagcctcctggtccaaggctgagaacgacttcggtctggtgcagccgctggtgaccatggagcaactgctgtgggtgagcgggagacagatcggctcagtggacaccttccgcatcccgctcatcacagccactccgcggggcactcttctcgcctttgctgaggcgaggaaaatgtcctcatccgatgagggggccaagttcatcgccctgcggaggtccatggaccaggaaacagcgggagccacggaagggccgcctcatcgtgtgtggccatgggacgctggagcgggacggagtcttctgtctcctcagcgatgatcatggtgcctcctggcgctacggaagtggggtcagcggcatcccctacggtcagcccaagcaggaaaatgatttcaatcctgatgaatgccagccctatgagctcccagatggctcagtcgtcatcaatgcccgaaaccagaacaactaccactgccactgccgaattgtcctccgcagctatgatgcctgtgatacactaaggccccgtgatgtgaccttcgaccctgagctcgtggaccctgtggtagctgcaggagctgtagtcaccagctccggcattgtcttcttctccaacccagcacatccagagttccgagtgaacctgaccctgcgatggagcttcagcaatggtacctcatggcggaaagagacagtccagctatggccaggccccagtggctattcatccctggcaaccctggagggcagcatggatggagaggagcaggccccccagctctacgtcctgtatgagaaaggccggaaccactacacagagagcatctccgtggccaaaatcagtgtctatgggacactctgagctgtgccactgccacaggggtattctgccttcaggactctgccttcaggaacacgggtctgtagagggtctgctggagacgcctgaaagacagttccatcttcctttagactccagccttggcaaaatcaccttccctttaccagggaaatcacttcctttaggactgaaagctaggcgtcctctcccacaaaaaagtcctgccctcatctgagaatactgtctttccatatggctaagtgtggccccaccaccctctctgccctcccgggacattgattggtcctgtcttgggcaggtctagtgagctgtagaattgaatcaatgtgaactcagggaactggggaaggctgagcctcctctttggtgttgcggtaagataaccgacagggctggtgaaagtccccagatggcaggatatttggtttcagagtaaggactaggtgcaccaccatgactgactatcaatcaaaatgtttgtaacttaaaatttttaatgaaggataatgaatatttgtagagtctctatggttctgtcaatgcacatcttcgtgtctgttttcctcatgtatcc

SEQ ID NO: 213 - protein, 146 aa, Homo sapiens
MTGERPSTALPDRRWGPRILGFWGGCRVWVFAAIFLLLSLAASWSKAENDFGLVQPLVTMEQLLWVSGRQIGSVDTFRIPLITATPRGTLLAFAEARKMSSSDEGAKFIALRRSMDQETAGATEGPPHRVWPWDAGAGRSLLSPQR

SEQ ID NO: 214 - DNA, 2066 bp, Homo sapiens
tcacgcgctccgggcctccaagagggcctccaagagggccaatcggaagggcaagcttcgagatgctgcgtgatcacgtgggaggagatgagctacttgaagaccaattagagtccgggaagcgcggcggggcctccagaccggggcgggcttaagggtgacatctgcgctttaaagggtccgggtcagctgactcccgactctgtggagtctagctgccagggtcgcggcagctgcggggagagatgactggggagcgacccagcacggcgctcccggacagacgctgggggccgcggattctgggcttctggggaggctgtagggtttgggtgtttgccgcgatcttcctgctgctgtctctggcagcctcctggtccaaggctgagaacgacttcggtctggtgcagccgctggtgaccatggagcaactgctgtgggtgagcgggagacagatcggctcagtggacaccttccgcatcccgctcatcacagccactccgcggggcactcttctcgcctttgctgaggcgaggaaaatgtcctcatccgatgagggggccaagttcatcgccctgcggaggtccatggaccagggcagcacatggtctcctacagcgttcattgtcaatgatggggatgtccccgatgggctgaaccttggggcagtagtgagcgatgttgagacaggagtagtatttcttttctactccctttgtgctcacaaggccggctgccaggtggcctctaccatgttggtatggagcaaggatgatggtgtttcctggagcacaccccggaatctctccctggatattggcactgaagtgtttgcccctggaccgggctctggtattcagaaacagcgggagccacggaagggccgcctcatcgtgtgtggccatgggacgctggagcgggacggagtcttctgtctcctcagcgatgatcatggtgcctcctggcgctacggaagtggggtcagcggcatcccctacggtcagcccaagcaggaaaatgatttcaatcctgatgaatgccagccctatgagctcccagatggctcagtcgtcatcaatgcccgaaaccagaacaactaccactgccactgccgaattgtcctccgcagctatgatgcctgtgatacactaaggccccgtgatgtgaccttcgaccctgagctcgtggaccctgtggtagctgcaggagctgtagtcaccagctccggcattgtcttcttctccaacccagcacatccagagttccgagtgaacctgaccctgcgatggagcttcagcaatggtacctcatggcggaaagagacagtccagctatggccaggccccagtggctattcatccctggcaaccctggagggcagcatggatggagaggagcaggccccccagctctacgtcctgtatgagaaaggccggaaccactacacagagagcatctccgtggccaaaatcagtgtctatgggacactctgagctgtgccactgccacaggggtattctgccttcaggactctgccttcaggaacacgggtctgtagagggtctgctggagacgcctgaaagacagttccatcttcctttagactccagccttggcaaaatcaccttccctttaccagggaaatcacttcctttaggactgaaagctaggcgtcctctcccacaaaaaagtcctgccctcatctgagaatactgtctttccatatggctaagtgtggccccaccaccctctctgccctcccgggacattgattggtcctgtcttgggcaggtctagtgagctgtagaattgaatcaatgtgaactcagggaactggggaaggctgagcctcctctttggtgttgcggtaagataaccgacagggctggtgaaagtccccagatggcaggatatttggtttcagagtaaggactaggtgcaccaccatgactgactatcaatcaaaatgtttgtaacttaaaatttttaatgaaggataatgaatatttgtagagtctctatggttctgtcaatgcacatcttcgtgtctgttttcctcatgtatc

SEQ ID NO: 215 - protein, 413 aa, Homo sapiens
MTGERPSTALPDRRWGPRILGFWGGCRVWVFAAIFLLLSLAASWSKAENDFGLVQPLVTMEQLLWVSGRQIGSVDTFRIPLITATPRGTLLAFAEARKMSSSDEGAKFIALRRSMDQGSTWSPTAFIVNDGDVPDQLGAVVSDVETGVVFLFYSLCAHKAGCQVASTMLVWSKDDGVSWSTPRNLSLDIGTEVFAPGPGSGIQKQREPRKGRLIVCGHGTLERDGVFCLLSDDHGASWRYGSGVSGIPYGQPKQENDFNPDECQPYELPDGSVVINARNQNNYHCHCRIVLRSYDACDTLRPRDVTFDPELVDPVVAAGAVVTSSGIVFFSNPAHPEFRVNLTLRWSFSNGTSWRKETVQLWPGPSGYSSLATLEGSMDGEEQAPQLYVLYEKGRNHYTESISVAKISVYGTL

SEQ ID NO: 216 - DNA, 28449 bp, Mus musculus
attctctcttgctttttgtaaaggtgtgtgtgtttgtgtgtgtgcgtgtatgcatgtgccatatgcataagatggaggacaacttgtatgacttggttttctgcttcttccatcatgagttctgggactcaaactcaggtcatcaggtttagtggcatgtgcctctattcactgagctatctcactacacgccaatctactcagcttacaattctattttgttttggttttggttgttttgagacaaggtctcattatgtagccttggctgacctggaactcatagagatctgcctgcctctgactcggatgggattaaacacatggtggccatgcccaattcatcttacaacactttttaaaaaaataattatttattttatgtatataagtacatcttagttgtcttcagacacaccagaagagggcatcagattccattacagatggttgtgagccaccatgtggttgctgggaattgaactcaggacctctggaagagcagtcagtgttcctaacagctgaggcatctctcttacaactctttttgttgttgttgttttgttttgtttttcaagacagggtttctttgtgtagccctggctgtcctagaactcactctgtagaccaggctggcctcaaactcagaaatccgcctgcctctgcctcccaagtgctgggattaaaggcatgccccaccaatccaggcttctcttacaactcttaataatggtcatcccttagtagagaaagctgatttgaccctcaactatgagagtaaatgttgacagggtgatgagaacacagggtctatctagtagaaaggacttacaaggagtttgaggacgagatcctgaaaattaaaatccaggtaaacagaggtgccatgatcagtttaattgtcaactagacacagtctagaactactctgagggattatcttaatcacattctttgatgtgagagaacccacccactataagcaacatcattccctgagcttgagaacctagactgaataaaaaggagaaagctcgttatccacagggatgtttgcagctgtgctgacaacataaaatgaagactatcctagctactccactaggttctagatgggcagttggtatttctagtactgctaattgaaagagtgttttgtagactgctataataggcctcagtactcagtgtgtatttgtttataaacccatgtctgaggccactcacctgagcagcttctgtccccacttacagcggcatctgttgaggattcctgtggggtatgcatagggagtgaactggttacaaggtaggctggtctggaggcccagatacagaacacaaaagcagccaaattagtgcctagctacaaattggattatcatgtgagggtaggaaaagggatggacacccagtcaggaaaatatataaacgggcatagccacaactcacaaaagcccatcacaatatctaaaactaaagcataacccagtgagaagctagacacttggagtcgcatccctaatagactccaaagccagaagaaccagataaaaactatatgaagcagttctaaaactcctcagtggacacacccatacaaagccagagactgaacacagtattgttaaggtcacagctgacaagcaaattacactatatggctagagtctatgaaggagcttgagtcaggtgggcacagagactgagatacctgggctggtgtggaaaggccatctggcaatgtcagtaagccagaagagagagagagagagcgcgcctgcgcatggctatagagtcaattgcttttctagcatgttttcagagtgtggggtgagcaacaggccacacctaccaaaaaggctgagcccctccttcagcccactggctactttgtacaccgaggggtgagactcactcttgaaaatctgtagaacgctgtcacagagaaatggaggagtctgaatttctatgcatcccacatgtggtatatgcatgcatgtacatatttggttttgagacagggtctctctatgtagccctggctatcctggaactcactatgtagacgaggctggtctcaaacgtatagaaatcccactgcctctgcctctcagtgctgggattaaaggtgagccaccacacttgcctgtgtgcacatatttgtatgcaggtgaacatgctcctgcacatatatgcagaggctttgttctctccatctcgttctcttttaagacaaggtctctcattgaacccggaattccccattttctttggctaagctggcagccagtaaaacccagcagtcctgtctccacccacgccagcaccaagactgcaggcacacaaacctcagtgagtggctttttatgcaaatgcttagaatccaaactcagatcctcaaacttgtgtagcaaaagcttttactcactaaactatgttcctatacatactgtaatggatttttttttttataataaagggagttgagaattaagaatagaaatgtgatttaagttaataataagcttcttatttcatgtctagcaacagtaatctcgatgtgtggtttattactcacttctttttttttttttttttaaagatttatttattattatatgtaagtacactgtagctgacttcagacacaccagaagagggcatcagatctcattacgggtggttgtgagccaccatgtggttactgggatttgaactcaggacctctggaagagcagtcagtgctcttaacccctgagccatctctccagtcccctattactcacttctgtttgacttagcttctccccttaggaaaggaaagaaaagccaggtatggtgtctcataccagtaacccaagcactcagaacgcagaggcaggcagggagtttgaggccagttggtctagatagtgggttccagaacagccagggttacatggagagaccctgtctcaaaaaagaaaggaggaaaaaagaaaaagtaaacaaaaggaaggaaggaaggaaggaaggaaggaaggaaagaaaagggtgggttgaagttgtcactcaagagcagggtacttgggctggagcgatggctcagtggttaagaacactgattgatcttccagaggtcctgaagttcaattcccagcaaccacatggtggctcacaaccatctgtaatgagatctgacgtcctcttctggtgtgtctgaagacagtgatggtatactcacatacatgaaataaataaatctttaaaaaaaatagggggggtttcttgtctagcaagcaccagtccctcagttaattcaaagttgcaaagaggaaggacggtgattcctctgtgccccttcctttcctttaccctcatccacacaatcacccttttctttccttcaagccccaggattaaagaagccagagcctcagtaggattatcagagccttaaactcgtcctttgtttctgcaggcagcagcttgtctccacctcacctgtaagtgtcttgatctatgctcaccagatgggtcctaagaacagaaaaagccgcaagaacggtgtctgaggcatgaggagtcactactaaactactcctctctcccaatacctctccaagcaatccaatctttctggttctcctgtgccagagcacacttcagccactgcccttcatctgtacacatacagacacacacacacactcacacagagaaatacacatgcacacaccctttcttcttagacctcccagtcctctttactttggttgaggtttggatgagtcacctacaatacaaacttcttgaatcccaggatagggacgccaacatcatagtcttccagttcaaccccaattcttcttcgactcaggaacttgagcagtcctccaagtgcccggacctgggaggggatcagcagtgaagttggatgaagcctagtgttccagaagctagacgacactactatcaggaaaaccgtgatttttacagggctgggcagtccagtcacaattctgccctgtggctgggagctcatgcctttccccagctgcatcctagccctcaccccatgacccagctcaccgtgaggacacagtcaaagggaataatggaggagaggaaaaggattttctcagtagcagtcatggagtctgagatgaaggagtagtttccggaaaggagacgctgtttgcttatctctggacctatttggggaggatggggagtgaaaggtctcataggtccattctcttgccccagtttaacaataagaacaaatctgaccatatggcttgtccaaggccatagaggtggttaaggaaagctaaagaaagaatcaaaacatacagatgtagtctcattctttcggttctttatgtaatgtagatgtctggctataagcacaacctgagagagacaagtgactcaggaggcaaaaggtcaagatggcagggattgtggatatatatggaactaatactaatactgcccatttcctgtatttcctgtcctttttgcaaacctggaagtttgcaaagtagggagtgccttatggaccatggttcccagaaacagtgccgtttcctttttaatgcaacaaaggactttggctccaacgttcaaaactgtttttaagagtatcatctctccattttcttccactcccccattcctcacatacctaaccccatagtttctcagtaagttgtactaaagatagtaaaggtgcaggagagatctcggggagactcatgatggggtgtgggaagcagcttccagataagagtacatgaggcaaggtttctgataataggagctcctttcagagaaaggacagaggccctgggatgggggctggtaacataaaaggaaggagctaccaaaatccacgcttggcagaagtatgatttcaggtccctttggctctctgtgctcctcggaggctgtggaggcaagaggccacagtcttgtacagttcaggcctgtcattgtcccatgctccctcccagccaaagatttagtagtctatttccatttccccttctctatgcaatccttaccaagcttccctagaaatcgagtcatagcctcatcctgtttggcacttgtgacaacagactgggggttgatttcatccagaacttgaagagagaaggaaggtgcctgatgagtcgaaggatatctccactgtgactaagaggaaagtggtggctctcttcctgccactgtctgttctcctcaagaatttatcatcttagccaggcatggtgacacatgcctttgaccccagcccttgggaggcaggggaatctccatgaaatcaaaatctgcctgatctacacaataggtttcaggataaaccagagccacatagtacatagtgagaccctgtctcaaaaaaaaaccaaaaccaaactaaagttattttatgtctgtaagggatggtctgcacactgggagcgcagtggaggagacttagtaaaggcacggtgggaaggaacaagagtgtcctggaaactatcactaaaatcatggtttgccagggacaaaatctgtagcatttcacatacagtaggtacctaataaagttgtgttgaataagtaattcctaaatcaggtgactataaactacatgaggatgtatgagtgaacacacgtcccaccccagaggagaggaatgcagggctctgtcgcacctctctggagaagctttaggctctcgtggtctggggcatctggcatgaagtggatagtggagtcactagtgtcatagtaagcaatgcccaggtatcccgagctccacagcacgcacagatggatctgtcccgcgaggaaggaaaggggatcgatatctgaatccctcggaagggcatggattggtcatcccttattattaatcatttaaccaaatctcggagataggcactcatggggagtttagtcaacgtgaaacggggtcggctcagcctctcccagccctcccaactccgcggacacctcggcgggctcctcctcgtcctcttcctcgatacctccaggccccgccattgggggctgagggctggggaagctggctgaggggattccggatctgggtccgggtcccggcggcgtccggcctggggtcgctctgaaagccatgggctcggcgactctgaggacatgggaggggaaggaggtccaaaagcagcattcagcaggcggctggtgcgcgggctttcaggggacaggcgcgggggctgcccctttaggttgggagcagctccgagctactgtcccaccctcattcctgtcactcgaagccgtgctttggaagctctgacggagcgcgctgtcacgtcaagtctctcccgccacccacgcccttacagccgcagcgcgctctcctgacccacccccaccccctcccccacccccaccccactggagccgccaattcgcagcactttcccgccttttccgtcacctcagccgcgacgatccacctccctgaccaaccgccgcaagcctgcagcctgtaggcgtgggccgcgcgcgctcgccccgcccccttagtggctgaaagggtctgcttagccatccaacgggaaggcggtgaggacgctagatgtcgattggtccgtttgcattgggggcggtgctagagtgttcaaaattcccgccctctgccgttgctaagcagccgtgtcgcagagctttgattgatgttgggcggagcccgccctaaactaaggtccccgcctggaaaaagggtctgggccacggtggagaaggccagagcccggaggccgaccttaaagggccagaggcagtcttcctccttcctgaagagtggagagaagcaacattaattcaacctgtgccaacagcaacaactccgttaatatttgtacccactaagttaatatttataaaaaactcagaacagtgcccagcaaacaaagtaagcgctacatgagtgttttaaataaataagtggaagtaagaactaactcctgtttcagacctactttgcctgtttcctgattgcaggagatgatcaccaaccacaggagcaacacggggcttgattattttggaacccctgaagaggaagtataagtatctgaaagacactaaattctgaaagtagacctaattagaacacatacaaccatactacagtcctctcacccctaaggacacagggtatctctgactgatgatccatctggatgggaaagaaggagaaggaaggagtttctgagggaaagaaaaaaaaccatactttacaaaacaataaacaaacaaacaaaaacttcagtgctggcttagcaggtaaaagtaccttcaattttgtacccagattgtcctctgtcctccatacctgtgctgcttgtacacacacactcacactcacactcacacaccacataattttttaaaaactgtcctagctacactaaactaagatcctgcctgaggttcagaaatggcatgaggtgacctggctctgctgatcagcgactggaaaaatcatctccaaaggggagcaggtctaagggctgggttaatggttactcttggcaaattattgagcaatggagttatggaaacctggaagaggttattggtgacagctctggggagtggcagagagggacacaccttccattctggggtatgaagagattagggactggtttaccaagaagaggaagggatcagacccaggaagagaaggcagcagaagaaaagaagagctggagaaagaagaagtgggagctcagagataagatggcagtctacattttttttttttttaatgcagtcctggcttcaaatccaggagcactgctgggtgatcccaggacagagcagcctggaaaataaaggcaagataacgcatttgtgtgtgcgtagcaattcaggcagccacagtcaatagtgatgatcagagcagctgcggccataaagacagccaagagaggcagccaaacctgtttgaatctaaagtttctcccagcgatctaactgtgagcagattgcccgctggccacttgctgaccagagggaaaaaaggaggtgtctgggaaataaggcttcatggaagccatctctcttatcagtgggaagaggctctggtgcagatctcaagggtcagcatagagggaacattcttaggactcagctggggctcacgcatgagtcagtctacaactgtctgcaacgctgtagttcaaaagcccaaacaccaagtatattctgccttcctggggaggagagagataagccagcccccccccccgccccccgcaccccagggaggagaaagctctcagaagaggaagcacaagaggaaaccactaactaactgctgttccagcaaacatgcatcaattcacctcagccctccctgcctctttcagtttccagcccagtctttcctctctgtctttccaagtccagaatattttcttcaaatatgtctgtatatgtgtgtgtgtgtgtgtgttagactgagaagaaaagaaagctagtcgatagtagagaaatttagagtgtggaggttagatattggcagacatattttaggtttttttgttttttgttttgtttttgttttttgttttttcgagacagggtttctctgtatagccctggctgtcctggaacttactttgtagaccaggctggcctcgaactcagaaatctgcctgcctctgcctcctgagtgctgggattaaaggtgtgcaccactatgcctggttttgtttttgtttttaaaaaaggtagaagtagtaggcagggcagtggtggcgcatgcctgtaatcccagcacctgggaggcagaggtagtcggatttctgaatttgaggccagcctggtctacagagtgagttccaggacagcctcaaccacacagagaaaccctgtcactaaaaaccaaaatacacaaacacacacacacacacacacacacacacacacacacacgagtagtagagctctcttcagtagcactcacactaaaattggaaagatacagagattagcatggcccctgcggaaggatgtcacgcaaatttgtaaggcattccatatttttatttgcctgtgctttatctaaaatcatttgtataggtgggtaattaaaagatactgaagtgaaaaaaaataggtagtaaagttctatctttatactaaagttagaccctccagaatcaggcctcccagggaaagtgacacccccccccccgtcttatttacttagatgtcccccaagactctgctcacactgacctgtctgacctttcctttttttcttcccgtgatagaaccagtcgctaccccacccaccccaggatgagcccagtgctatcctagaaccaggataagtctccaaggcaacattcaccattgagaggagggtaaggggcccgggttggggaaagtctaagcttggccaggcttccagaggaccgccccctgccgtgaagcctgggctcagcttcctgtttcccctgcatcaggcctcctggcctctggcggcctgtgtcttggagtgccctttgccaatctgtagtcctcagctcactatctccttcccgatccccctccacacacgcagagcacagtcccagcaaaccagaagactgactggataactgaaaacaaaacaaaacaaaacaaaacgcagaacccttgcatcctcaaactccctttctgcacctccgtggtcacttcgctagtgtcaagcttccctgtttgatagtggccacccttctcattaacgaagcgaggaaactgaggcacgaaaatgctgctgtgtttaggagaggtcagggaatcgaggaagcccccggacttcccttctaacaccttatccctgggatcccgagacctctgacttcagtcccggacccactcccacgatccccgtgtcccctcccctcatgtcccctccccaggtccagggcggggccggccggtgagtcagctgctccctgagctaaacaggagggaccgaggtggagcagctgggtgtggggtgcactgggcctgtggggaagccgtgttggagcgaactaaagggtctgatcggacttgggttgcgccgaagggacagccctgagtctggaggagagaatcccggaccgtgagacccgccttcccttgccccggcccctcccagttcccccagcgacggctgcttcctggtccccgacgcaaccatggctgaagaacaacctcaggtcgaactgttcgtgaaggtaagaacactttctctttctttggccactctcaggatttctgcaagtcagtcctcccctctcctgggctccagctcaaactccccaaccccttcctagttgaccccactcccagccccggtgctgttttgctgggggcagggtgggcgggcagacacgacttgtgagacggtaatgggagtgctagactcgccctgggaagtttatagaagaggtttccagcagcctaaaggggagaaaggtaaagtttcaggaatgagagagtgaatggggttcggtgcgggatccagggggatccagacaagagaaggaccgagaaagggacagtggtggggttcgagaaggtcaggagagttggctacgacgtgtggccctatgaaagaaagagaaaaatgaaagatggggcagagagaacgtggggagagagcgagaaagagggagggagagagggagaaaaagaggagaggagaggagaggagaggagaggagaggagaggagaggagaggagaggagaggagaggagaggagaggagaggagaggagaggagaggagaggagaggagagagagagagagagagagagagagagagagagagagagagaatgaataagaatctggtagggttgaaggatgagtgtgtcgcatggtggaaggaaagagccttcacgaagaagcagcacaatcagtggctgagatgactatcccccagctgaggcaggaaggagattaaagtttagcagtagttacttatgaagagaggagaggagagctccaaaggggacaggagactccttgggttagatgtaaatgccgggctgatacgtatggaagaaaaagccccctccccctgagccctcccccttcacactatcctctctgtgggtgtggtcaaggcgagctggtgctaggcttttggcttttgggttcggaaaccgctggctgccgcgctcctcctctgcccaggcctgtcccctccggcaccacccttccccatacccccgtgcacgtcccttcctctccgggcaggtcctctcccagtgagcacattcgcactcgttttttgcttctcggcctctcttggcattcctttcgttcttcccgtctgtgtgtcggtgttctgtttttctctatcttttttttctgggttttctctggctgcctttcccagtttcttggcccagggaagtgaactggagcctgggtccgccccttaggtgtggtccccacctcacactcgcctccaggggctatttttaccctgggcgaggagatgctgtagagatcctggccctttgtcctgtgacgaggatcttagaggaccagaggacatgagtgagggtttggggaactgtaggagtggcggcagctgcctaggcctctgtgtgtataggtccctgcccccacttccttgccaggaaggaagctgctgaggcctgaagacacagaaatgaatcaccctcagtctagggggaggtgtcccttgggggatgaggtcacctgcatccaattagagagttgccccctttgttaggtcctccatatctctaagttgagattaggtcctctgcctgccaggcccagcttccagaaacagcttagatagaggcttagtgaatggggaccctagtttccaaaccctgccctacctctctgctccgctgaagatctagtattcaattccaaccccaccaagtcccctattctttgccttttgaatcctgattctcaaagctagccaagacttaactgttcctctgcctcctcccaactgtcaatcactgggatgccaccagcctacctttgctgatccagaaccaaaggagaaaataattccgctctcggggtagcgtagagattgtggcagtgtatgtcagaattagcaagaggttcagagagcagcctggtaaggatggggtgcgccaagcctaatgctgagtgtgttatttttttcaggctggcagtgatggtgccaagattgggaactgccccttctcccagagactgttcatggtgctctggctcaagggagtcaccttcaacgttaccactgtggacaccaagaggtgggtccacttctgaccctctaaacatcctttgtgtggatgcacgtgcactgcatgcgcatgcgcactctcgtgaacccgtcttccttaaaccggttctctctctctcgtctgggacaaatctctccattcttatgtccctgtttctgacacacacacacacacacacacacacacacacacacacacacatcccttttcctttcttgacgtgtgacctcttctccagacggacagagactgtacagaagctctgccccggtgggcagctgccgttcttgctctatggcaccgaagtgcacacagacaccaacaagatcgaggaattcctggaggccatgctgtgccctcccaggtacagggacacttggaaagaaaaggggagctgggaggctttgcagaacaaaggtcgaagaggggagacagggaggcagggcgaagtaccccagaaaggacttcactttatccctctgccttccaggtacccaaagctggctgccctgaaccctgagtccaacacctcgggactggacatatttgcaaagttttctgcctacatcaagaactcaaacccagccctcaatgacagtgagtcttatgggtcaggggcttaggtcctgcagggttggggcatctgtgagctcggctgtcagggagatggagaggatgttttcagacccccgctgagcctccattaacctcctggctggctggctgtctcattgctaagacttttggagtttagggtttgttttggttttttgtttgtttgttttttggtttttttgagattttatttatttcttatatacatgagaagtatttgtctgtatatctctgcatcaagagcatgaagtgcctgaaggccaagagagagtattagagtccctgggattggagttacagatattggctgggaatcaaacttcaggtcctctgcaagaacagccaatgttctcaaccactgaatggtctctgcagtcccaagaccagctttttaattgggtactggcatttgaagctgagttcttatgtttatacatcacatgttgtacccacaaatcatctctcaaccgtctagagttcactcttttgttttgttttggttggttttttttggttggttggttggtttttttttcttttgtttttttgagacagggtttctctgtgtagtccaggctgtcctggaactcactctgtagaccaggctgaccttgaactcagaaacccgcctgcctctgcctcccaagtgctgggattaaaggcgtgcgccaccacatccggctcctacaattcattcttaaagtgcatcctcatgtgtgcagcccacaccaccacgtgtactgcagcattgccaggctcacagacatgagagctcttttactattttgcatacatactttgctctttggtagaactggggaatgaccgattctgggaaggtctcggcatctctctaaatctgcttccagatctatagagtggggataacttccattttctcgatttgcgtgagaagtgaatggctgagacttgtttctagactgactgggaggctgagggagaggatgtgactcagtgtacagagcttgacttgtgtgcgaaatcctaggctccatttctagcgcttgtggggataaattgcaagccggcggctggggagatggatgtcacctgtgtgcttgctactaaagtctgagtaccgagtacttgcgtttggatgctcagtggtcaaaatctttgaatgatgggcacctctgtaatcccagtgctggggaagcagaggtaggagggccctgggctcaggcgatcagctaatagagtctgattgataagctctaggttcagggagagagaccttgcctcaaaaatacagtggggactggaaagatggttcactggttaaaagctcctgccgaggactgggttttggtttccagcatccacctgacagctcacactacctgtaactccagtttctgggggtctgaacctgtttctgaccgccaccaccaccaccaccacgcctgctaggatcctacatgtacaagatgtgtgtatacttctatggcctcgcacacatacacataaataaaaatatataaataaaccttagagagagagagagagagagagagaggctggagagatggctcagcagttaagagcactgactgttcttccagaggtcctgagttcaattcccagcaactacatggtggctcacaaccatctgtaatgggatccgatgccctcttctggtgtgtctgaagacggcgacagtgtaatcatatacataaaataaataaataaatcttaaaaaaaggaaaaaaaaagaaaggaaggaaggaaggaaggaaggaaggaagatggagaaccattgaggaagacaatggatattgacctctgacccacacacacacacacacacacacacacacatgtaaacacctgcacacatatgtcacacaaacatttaataatagcattcacaatgaagttgttttgtttgtttttcttaatcaaatccagggtctcacacatgctaagcaggctctttctctctgagctatgccctcacccctccacagctcttcttgggcaggttatttaaggttctgatcagcttcctctcttgcacagacctagaaaagggactcctgaaagccctgaaggttctagacaattacctgacatcccccctcccagaagaagtggacgaaaccagcgccgaagatgagggcatctctcagaggaagtttctggacggcaatgagctcaccctggctgactgcaacctgctgccaaagcttcacatagtacaggttggtggtcaccgtggggggaaacgggatcaatctctaaagtgattttttttttttttttgagacagggcttctctgtgtagtcctagctgtcctggaactcactctgtagaccaggctggcctcgaactcagaaatccgcctgcctctgcctcccgagtgctgggattaaaggtgtgagccaccacgcccggcggtgattttttttttaatcaccttttatttattacaaagggcaaaacacaaacggggtttggaaatcaggagaaaactggggggagtcagttttctcccctccaccacgtggatcccaaagattgagccttggtcacctgacttggctgcagatgcctttactctgctgagcagtcttaccagtccagtgttgctgtccatcatgcctaggcttttacgtggatgctgagcatccgaactcaggcacgcatacttgcacagcaagcatccactttctccgaatggtttccatagattgctaccagtgatgggcccctgcccagggaccacacccttagcaattgttgcccaagtaagagaattacatcccatgacacaagccatgcttatacagcatccattaaagagtggcattcagttttactgtatgtctgtgttttatctgtgtacatgtgtgtctgtatgtgcctgtgtatctgtgtgcatatgtttgcctgtgtgtatgggtgtctgtatctgtgtgtgcctgtgtgtatgtgtgtgcctgggatgtgggggagggtgcgcctgtgtgtatgtgtgtggctatgtgtctgtgtgtatgtgtgtgcctgcctgtttgtatccagggttgcttccaagaaggcttttcctgcaactgtatcactgccaaatgtacaaatcaaacaaaggattctcccaggtctatgatgtaactcttcacatagtccaggcttcccaggttctctcaaggactcttcctgagttgctgtttcctttctgtcctggccttaaagttacagtgtaatttagtaaaacacagagccactatcactccaccatcaactgagaggcaccagacagtaagaaagctgggcagagcgtctcctctcctgcctgtaatcctcagcgtgctgcaggctgaagtagtaagttcagtgcgagttggaggccagccttagctacagaataagagcctggttcaaacaccaccactaccaccactaccccacacacacaaagaaaaagaaaaaagagaaagcagccaggcagtggtggcgcacgcctttaatcccagcactcaggaggcagaggcaggtggatttctgagtttgaggccagcctgatctacaaagtgagttacaggacagccagggctacacagagaaaccctgtcttggaaaaccaaaaaaaaaaaaaaaaaaaaaaaaaaaaaaaaaaaaaaaagaaaagaaaagaaaagaaagcaacgagaaaagaagcaaatgatgttcatttagttcttgcccacaaacagttgaaattgaattgaagagaaagcattcacatcaagggatgtgatggcttgcagagatggctcagtggttaaaagcaccggctgctcttccagaggatctgggttcaattcccagcacccacatggcagctcccaactgtctataactccagttctagagaatctgacatcctcactcaggcatacatgcagtcaaacaccaatgcacaaaatataaaacaaacaaacaattaaaaaaacccatccacatcaaggtactaaaagatgacctgaaagaagtcaagtgaaaaggagacaaagttctctacaaaaatgtttactctttgccaactctctctctctctctctctctctctctctctctgtgtgtgtgtgtgtgtgtgtgtgtgtgtgtgtgtgtgtgtttactgataatggagcccaggactaaccacaaccctagcctgtgtttgtctctgcctctgtatatattcagttttaatcacacgtgagtgcaggtgcctttggagtgcagaaggcggtggtagatcccctggaactggagctgcccactgagggcgctggaaaccaaacatctacagcaggtgttcaccactgagccatttcttagcctgtctctctctttatctgtttcttgagacagggtctttctatttagttttagtgaccatggaacttgctagtgagttctaggactgccaggtttacacagagaaaccccatcttgtgatgtgtgtgtggggggggagggggtagtgaggatggggatggaagggaaagaatcggtgagaagtctctagaggggctggctcaggggttaagagcactgactgctcttcttgaggaccatgttcagttgccagcacccacatggcacctaacagcatctgtaactcagaccagaggatctgatgcacagtcatacaaataaacaaacgcccatcctcataaaataaaaataagtctagccagcatggtggtgcacgcctttaatcccagcccttaggaggtagagatgggtgcattccagagtttgagaccagcctggtctacagagcaagttccaggacagccagggctacacagagaaaccctgtcttgaaaagcctaaataaataacatctaaaagtacaatttttaaagactctaggcacagggtacatgtctgtaataccattccagagatcatccagcctgcgtgacacagagagaccctatctcaaaagaacggcagcaaaaaagcttgtaagaatcgaagttcattggtctggcatcctggacagggctcggttttttgtttgttttgttttgttttttgtttttgttttttacctggcagaccctaaaggaagagaaagttcaacagcttcaaagcaaagcaagcatgccttccctggggctaacacactgacctctctctaacctttaggtggtgtgcaaaaagtacagaggcttcaccatcccagaggcattccgtggagtgcatcggtacttgagcaacgcttatgcccgggaagaatttgcctccacctgtccagatgatgaagagatagagctagcctatgagcaagtggccagggctctcaaatgagcactttttaaagggtccttcacccactctgtgctctccacagaggcttcggggggcttccacgttgctgcataatggacacactccgaaattgccagtgggcaggaaatccggggcacttgtggggtggggctgtgggataaggcaaaggatagtggacaagggtaagatttttattttgggatggggtgggtaggacaacgcatttcagtaataaaatacagaatggaaaaaaatctagtgttgtttttacacaaagacggcttaaagtgtagtgggctccaaatgaagagaagggtcagtgatcttttaagctcagtgtaactgctgggaatttgggaggggagtgtttgtacaggggctgccatgttttgtatctgtccataagagggctgtttcgtggtccacatcgcgattgtaaccccacagccagggctagcaggatcagggtgggcctggacactgctctgggggcggtgcctgagttcagggaaggggggcactcagccctggaggaatgggcgcggcctagcagggcggaatgggcgtggtcttagaaggtcccgccccgtcccgcttagacaatgccccggagccgccagaccatcgcgcccccgccccatcgtcgtacgtgagctctcctaccctgggaacccctcaaaagcccgagctatccgtctctccagcttgaggactcagactcccatcttcattaactctctcctctgggggtggggccaaggctgaaatcacaaggctgcaggagtggaggtggccgctggtgagtctgaagagggggctgtctccgaaacggtatggggagactggagtttgggggtgctgcatacgtccctgcaccggacggagtgtgcgaataacctgcacttgggcgaagagctgggcggggtagactttagaagatggacaggggtacggagttctgaagcctggagtggctccacgccgcgcccctcccccgtttctccgccctccagatttcgtttaagacctctcccagtcctccgggactaagtctggtttgtactgggtcgctcgaagggcagcgtgacgacccggggtggagagagaggatgcttaactccttagattctagttcctcgggtttgcgcccgtttccctttctccttcgagcatacgggacttcacaccccaggtcctgattcaccacccagttttcttttccagtcctataacctctgcgggtccctggcaggactttgggtccctcctgctgcgagcagctgagggttaagggggcggggccgccgcatttttggggagtgagcgcatcctagcggctgccaggaggggcgcggggcagggacctagcggagccccgagcaggggcaacaggtgtttgggagattaaggatccaagtcttgttcccttgggcgcctcttaaagcagatccccggtgaaaggaggctgagcggggtccacagagccagaaggtttggagggggtggggcagagtgggaggggcgcctggagatggcaggaggaagacctaggagcttttaacactcaccccttctcttctttgcatgtctttctcttctacccccacccctttctgtttcttctcttagaccagtgaagtcaagagaaaaaacaaaacagcttggctggaaggggcttcggtgtggatgtgatggggacgccgggggaggggctgggtcgttgttcccatgccctgatccggggtgtccccgagagcttggcatccggggaaggtgctggcgctggtcttccggctctggacctggctaaagctcaaagggagcatggagtactaggaggtaaactgaggcaacgactagggctgcagctgcttgaactgcctcctgaggagtcactgccgctgggaccactgcttggtgacacggctgtgatccaaggagacacggccctaatcacaaggccctggagcccagcacgtaggcctgaggtgaggacccgggtgcgggtgtgttggagaacaggattgcgcggggtggggtggaagaaggtcgaggggaggaggctggatgtctgggattggcagaaaatagggagtgaggatgtctctgcctgctctctcttctccaaggttgatggagtgcgtaaagccctccaggacttgggactccgaattgtggagatgggggatgagaatgcgacgctggacggcaccgacgtcctcttcaccggtgaggcaacggatggtcagcacctatgtgggcttggcaagggaagcagagtttgggagactaggcgatctcaggtcttgactccaaactcactctggccttcaaaccttcgcatcctcccgggattcaggccgggagtttttcgtaggcctctccaagtggaccaatcatcgaggagctgagatcgtggcagacacgttccgggtgaggaaccagagaagtttggagaatgagtgcggccaatatgccagagggcttgacctgtgctccttacgcacccctaaatcctcctgctcttctaggacttcgctgtctcaacggtaccggtctcaggctcctcgcacctgcgcggcctctgtggcatggggggacctcgcaccgtggtggctggaagcagcgaggctgcccaaaaagcagtcagggtgaggcggggcagggctatggtgaaggcgtggtcaacaaagtgggcgtggtttagggcacagaagttgcctagctctgggaattgcccacaacccttgtcttcactaagatgttcagctaatacaaagggacaccctagtaatgatggggtacagaagaaacaagagtaggggaggggttgcaaaaggcagcggtagctaaagtgcctgagacgactgtgtctgtcacagcaggcattatatacttgctgtcattatctcacaaaagtaacccttaccccaagatcttactttgtggtaggtcaggcatactcagctgtggagacctcaatgccctcttcctctctccaggcaatggcagcgctgactgatcacccctacgcctctctgaccctcccagatgatgcagctagtgactgtctctttctgcgtcctgggttgcctggtgccacacctttcctcctgcaccgcggaggtggggacctgcccaacagccaggaggtgagggagggaaaaaccgccccaccaaccagagaaagcagtctgtctttcccagtgggagaaaggaggggcccatcctcagaagcctgggtgggacccactgggaactggctagaggggggttgtggctctgttatcaaaacatccttggggtcctccctgcaggctctgcagaagctctctgatgtcaccctggtacctgtgtcctgctcagaactggagaaggctggagctggcctcagctccctctgcctggtgctcagcacacgcccccactgctgagggcctggatttggggatcccactggttaggaatagagctgtatagtgggtagaatcagctaatagaggctgggtagttgtggggagatgccccaggatagggaaggacttagtgtggaaaagaatagaagccattgggtgagtcctctctgtcaaaaccaataaaataaaattgaccttttagataagggctgtgactggtttctcgatgggacaaagggataggatggggctgaaatccaaaactggggtcggtgctagggagacagattctttagcttttttttttttttttttttttttttttggttttttgagacagggtttctctgtgtagccctggctgtcctggaactcagtttgtagaccaggctggcctcaaactcagaaatccgcctacctttgcctcccaagtgctgggattaaaggcgtgcgccaccacacccggctgattctttaacttttgttaaagacaatgtttgtgtagctgtcctggagctcactctgtataccaggctctcctcaaactcaaattcacctgtctctgtcttctgagtgctaggattaaaagcttgagccaccaccgcccagctggactctttcattttaaaaaccctctttatgggcttcctgactcacccctaccgtgccacaggactcaggtacaaagagagacaggagaccgtgtctgttgtggggaatgcaggcagggtggaaagggaattatgctgtgtgcatgggtggatcactttctgaatttacctaaatgtcaggtgactcaggctcaggattcaaagtctgcctttatttgataaagaagggatgttttccaggacgctcattcatggtccaaggctgaactcatacttcctgatattttcttataaactgacagacgtgttgtaatggggtgatttatttgctggagtctggttctataaggaaaaaccagggggtttctagagcatcaaattttgtgcagaagtaggcaagcatttgggatgaggctatctcagaaaaagctacatttgaatgaaatcctgggaggcaattatccaggtgggaagggaggaagaggaaaaaggaatccagaaaacaaaatttatttcaaagagccaacgagtattgtagggagaacattgtggagaaactctctgagggcgtgtgcacacagaaaatgatggataggcctaaaaaggggcccagtgctggagcctgaacacagagcccacgctcacagccccagagctgaaaccttgggaaagaaccagtggttgatcctgggaatcttgctggctttgagtaggaagagcagggcacgaggatcagaggggtctgtgggtcatcatgaagcaaatgatgacagtacattctggtggcagcattggacatggagaaaggtacagaggacagtgacctgctacagacaaggccttgtgtggttggtggtgcatgcttgcaatcacttttatccaaacactgaaggtagacataaggagagggagatttcaaagtcagcctcagccataagagagcctgtctttaaaaggagtggaagcggcgggttagggtcctgataagtccttgtgtgggagaggagatggtgtactctgaccccagtttctggcttggacaacttgggttcttcaagagctttcagaggaggacccaggggatggcttaagaaatgactgagtcaggtttgacaagccttgggcaaaatgcctgaggccatctggacagagtgaactaggtctgagatctggcttggaaggactactgtgtatcatttgggggctgaagattgattggccagcttcctagaagagtacggaggagaaacaaagagatgagcagaacagtgctactacaaagacaatagcaacaaagtaaaccctggtttaaacaggggtgaatgttatctggtggtaggacatcactggcaacctttcagtggatgagcagcagcagcagccaatgagcagggggagtgcagtcagaccggtaacgaggcaggtctatgtctaaagtttgaaatgcttcattgggccaggcagtgcctttaaactcagaagttgggaggcagaagcagatgaattctctgagttcaaggccagcttggtctatggtctacggagttccaagacagccaaggctatacagagaaatcccagtcttgggggggggcgcgaagaaaaagcttaacaggcagcttgatcatctttagagagggcagcagtggagaaggaaagatgttacagaagatggaagtgacagaaaaaaagttgaccattggcagaacgcaaaccaggtagtcagtcgcctctatcagtgcctctgtccatggtgcctgccccttctagctgaggttatacaggggagccccagatagaaagggttggcagaacaagggcttccctttatactacaaccgcatagacagtggaggcatcaccagaaaccactgtggacatccggcggtgcctcccgaggacagagtggtccagatcagcgtagtgcaggctctggaggaggtagagagaggacggtagtatggtctcatcaatctgaccccttagcttggaatcaaagctttttttcttttccccactgtgggtaaaggcgactatgtagcaaagcctggctttcatcttcctgcttaaacctccagagtgctgggattacactgctgctccacagcaacctagctaggctgctttcttggccctctttcctccgggattctggcctttttcccatccccaggcccttaccggctcctggtccaggtggcctgagatcttggactcctgttctaaaggcctctgtggctcagcatttatgactggagctatgtgggagggagggacagaactgaagggtgaagagaaaatgaccaactttgtctgctcctcgcaaggactcagactcaagaactcagggttagggattgtgcgggtaggatagggaaattgagtgcagttaatctcaccaaatgtgggtagtggtccaggcgggggcgggggtgggggcggaggcgagagtctgtaaggaagtccttgaagagtcaccaatctcgtcttactggttcctcggccgcaggcggcgccaataagaactgtgcaaactgcagtctccgaccagcaaaacaacttaggctcctctggaaccaggtcccgcccactctctgggctttctgacctttcagtttggtttctgcagcctcggttccctactccagcctgtagcctagcacccaagggctgacctctcacattcttttaacaaacgccaggcctccagacacttctttttctttgtaaaggttagggctctgccccacctctttccccacgccctgactggtcacaccctgtttcatgccaggctccgcctccagtgctcacctgcgccgccgccagaccacgcccgcgactcccagtcccagcacaagcccaacgcccaggagcggaatcaggaccttgggatactcgtaccctagggagaccgcgaggcagggagagatgccgtggtcaggggtacagacaatagggttctactaactttaccgctctgtaagattccgccccgctttttgtcccgcgtgtgtgtccaaattaagtgcccctgtgcatctgggcctcgacctaccgtgggtagatcctgcaggccggcaacctgccttgtcccctaacacttgaagcactgtgcgactctcattctcgtggcgtcctttgcagaaaaaggttccagaatccccggcgctcagcagcagctctagccgcttgataccattgtccagggaacgcaggcggccagagaaatgctggagcacagttggggtccctctcgtcgaggcccacaagatcggacggcgccctttagacaagcccttgcatgctgggaaactaggcgcccaagcccagcgggtggggtcggagacccctatgcaggagagattcacccggtccccagggctgccctccaaagaaactaggaaaggtgggggagggagatagttagggctagtttatcaggcgctctctctgtctctctgtctctgtctctctcccacccccccgccccgccgcgtgcgcgcgcgcgcgcgcacacacacacacacacacacacacacacaaggtgatcctagttgtctcagtctttctttgcccatcacaacttcccagggatggcctaccctcgggattcccctggacctttgagagcaacaaaggcagcagcggcaggaccaaggccatggttgggatgtggtggtcagaggcgggagtgaatcagcagggagaccggagggaagcagaggggcagggatggggatcctgccggactgggggctcagataagagcgagtgtgaggccaccaatttctggatccctctaggaatcctcaagccaacatgcagtcttcgaactttgaaatgattttaaattttgtgcttgaaaccttttgcaaaggcgctatgcttttttgcgaacaactaccatggccccaaagtaccacaaatactgaagctcagcttcctgagttcgaatcctgagttcatccagccacacagtagctgggtgatgtgagcaagccacttaatccctgcctgttccctcatcaggaaaatggagctaaaagcatgtgagaaccaaatcaatacattgagagagtctaaagcaatagatgacatatgggagtactcagtgtatgacatggtcattattatctctatcttagttcctatctcacctctgtgtgcccatgatgttcctccctacccaatgggctcctccctacccaatgggctcctccctacccaagggactcctcccaaacccaagtccaagtggggtgagggcttccttggcatgttatacagcctcagccccgcctctctgacatcacagaaaccctccatgatgccataagcccttctttatcttgtggctgagcatcagttggaagactggctggggaatggatctacattaattcacctgtttcgtcaatttctgctggaatgtctgatcaatgtcctcccatccctaggcacccaaagttgctgaaacaactcagttactgtctgtttcctgggaactagcagaaactagtgttgtggctgtctaagtcacagaggcttttctgatgctctctccagggcagggggccctcagctgggggtcctgaatccaagatccaaaatggagttgcccactagtgacactttccccctcctatctccctctcctgtctccccttcctacccaggccctcttggaccctttccacctctagtctttctctttagtcagctgggaataaattgggagggaggtgcccacagagggcacaggcccggaagggaggagccattgggattataaattctgaaaagaccgctcaactctcagagctggagacctgggaatctgctgtcaactgctggggctgtggacattctcaggaccctcaccatgaaacacctcctgttgctcaccctgtctgccctactctactgctgggtctcaggtgagtgctgaggggccccaggccccatcccaaccctatccaatacttcatatttccctctactcaggatcccaagaagtcccaaccctacatggcttagtctcgccaatgcctccaggatcagatatctctgagcatgatgggctctagttttcttactcctctccttcttttccttcctccttccatttcttgtattcttttttggggggggtgggtcagagtctcctgctttgaactcctgatcctcctgcctctaccttctaatgctgggattacacatgtgtatcacacctaggctctttggtccattatcaaggacccaggtctccattgtcattttctcctagccctgtattggcctagcctactcttcttacctggcattatggcactaggtctctatacacctttcctgcactctataacacccagatgtctgtctagccagttccaaatgcacttctccaagattagcatacctgccttcactcacctactgccctgagctgagggtcctcatagaaaggattccatgccactcctctcagagcctcagcgatggcccttcctggctcgttccctgctccttcctgagttacacacctatatccctaccggggatgcaaagccttctgggtggacccagcgactgctacagccttcccaagaatcagaaactttccctgagccttctacagagaagatgctgcagcacttaccctaaagtgagatgcgtttccgggaggctctctaggctcctctacccctgggctgaccattcctgcgccgcactttgtgtgcttacatctggagttagccaacccgggaatcctggcgtgtcatccgctgcacccaccctctccatttctgttagatgccagtgatacgtctaccaggtgttagttttcctttttccatagagcaaacgccagaagagtagagatgattcattcagtaatctccccaatctgttggcagaggtccagtccacttctaaagctagtcaccggtgactttcttgcagccgtggtttcatgccatctctgaaggctctgtggactcctttaacttctttctccctatttcaagtctcaccctggaccccaacctctgctccatccctctttccacacatctcagccatcctcagctccgggtttttgttagtacaattcttgactcatctcaggcaggcttgggtggaggaaggtatttaggtttccacatagaacaaacacctccgcccagtgcccacaccactttgcactttcgccgg

SEQ ID NO: 217 - DNA, 1159 bp, Mus musculus
ggtggagcagctgggtgtggggtgcactgggcctgtggggaagccgtgttggagcgaactaaagggtctgatcggacttgggttgcgccgaagggacagccctgagtctggaggagagaatcccggaccgtgagacccgccttcccttgccccggcccctcccagttcccccagcgacggctgcttcctggtccccgacgcaaccatggctgaagaacaacctcaggtcgaactgttcgtgaaggctggcagtgatggtgccaagattgggaactgccccttctcccagagactgttcatggtgctctggctcaagggagtcaccttcaacgttaccactgtggacaccaagagacggacagagactgtacagaagctctgccccggtgggcagctgccgttcttgctctatggcaccgaagtgcacacagacaccaacaagatcgaggaattcctggaggccatgctgtgccctcccaggtacccaaagctggctgccctgaaccctgagtccaacacctcgggactggacatatttgcaaagttttctgcctacatcaagaactcaaacccagccctcaatgacaacctagaaaagggactcctgaaagccctgaaggttctagacaattacctgacatcccccctcccagaagaagtggacgaaaccagcgccgaagatgagggcatctctcagaggaagtttctggacggcaatgagctcaccctggctgactgcaacctgctgccaaagcttcacatagtacaggtggtgtgcaaaaagtacagaggcttcaccatcccagaggcattccgtggagtgcatcggtacttgagcaacgcttatgcccgggaagaatttgcctccacctgtccagatgatgaagagatagagctagcctatgagcaagtggccagggctctcaaatgagcactttttaaagggtccttcacccactctgtgctctccacagaggcttcggggggcttccacgttgctgcataatggacacactccgaaattgccagtgggcaggaaatccggggcacttgtggggtggggctgtgggataaggcaaaggatagtggacaagggtaagatttttattttgggatggggtgggtaggacaacgcatttcagtaataaaatacagaatg

SEQ ID NO: 218 - protein, 265 aa, Mus musculus
DPPSLAPAPPSSPSDGCFLVPDATMAEEQPQVELFVKAGSDGAKIGNCPFSQRLFMVLWLKGVTFNVTTVDTKRRTETVQKLCPGGQLPFLLYGTEVHTDTNKIEEFLEAMLCPPRYPKLAALNPESNTSGLDIFAKFSAYIKNSNPALNDNLEKGLLKALKVLDNYLTSPLPEEVDETSAEDEGISQRKFLDGNELTLADCNLLPKLHIVQVVCKKYRGFTIPEAFRGVHRYLSNAYAREEFASTCPDDEEIELAYEQVARALK

SEQ ID NO: 219 - DNA, 25988 bp, Homo sapiens
ttcaggaggctgaggtaggatgaggcagaagaatcacttgaacccaagaggcggaggttgcagtgagcctaaattgtaccactgcactccagcctgggtgacacagcaagattccatctaaaaaacaaacaaacaaacaaaaaactcaagagcccaacacacatatgtaaaaaactggacggccgggcgcggtcgctcatgcctgtaatcccagcaccttgggaggctgaggcgagtggatcccctgaggtcaggagttcaagaccagcctgggcaacatggtgaaaccccgtctctactaaaaatacaaaaattagctgggcgtggtggcaggtgcctgtaatcccagttactcaggaggctgaggcaggagaatcgcttgaacccaggaggcagaggttgcattgagccgagatcgcaccattgcactccagcctgggggacaagagcgagacttcgtcacacacacacacacacacacacacacacacacacacacacacaaaactggacacaactggccaggcgcggtggctcacgcctgtaatcccagcactttgggaggccgaggtggacggatcacgaggtcaggagatcgagatcatcctggctaacacagtgaaacccgttctctactaaaaatacaaaaattagccaggcatcgtggtgggcacctgtagtcctagctactcaggaggctgaggcagcagaatggtgtgaacccaggaggcagagcttgcagtgagctgatattgcaccactgcactccagcctgggcgacagagcgagactctgtctcaaaaaaaaaaaaaaaaaaaacctggacacaacttactgagatatgaaactatatggatatttgcggagatgtccctaatataccctaaagccagagacaactgataaagactctatacaaatcaaataggcagttatgcagttacaaaactcttctctatacacaaggtctcccaaagtccctaacaggtacccaactagtagaaacattcatacaaacccagggaaggaacacagaattggtaaagtaatggctgatatgcaacaacactgtacagccacaaagtatgggaagatgctcaagcttggggggcggggggtacaaataggtaagaaatttggattggcatgaaagagatatctgacaatgggagtgaagtgggaagggaggctgggacacatctttggagccaattgcttttctggtaggtctttgtaatgtgagatgagggatggggcacacctaccaaagaggctgagcccctccttcagtccactggccactttgtacactgaggggtgagactcactcttaaaaatctgtagaacactgtcgaggagaaatggaggagtttggggtaacttggacttttgaagggaataagaattgaggactgataaatggaatggggacaggggatatcctcctgagatcacgtctttttttttttttttttttttgagatggagtctcgctctgtcgcccaggctggagtgcagtggtgcaatttcagctcactgcaacctctgcctcctggattcaagcaatcctgcctcagcctcctgagtggctgggattacaggcgcacaacacacccagctaatttttatatttttagtagagacggggttttaccatattggtcaggtctcaaactcctgacctcaggcgatccacccgccttggcctcccaaagcgcggggattacaggcatgagccaccgcgcccagccgagatcatatcttgatgtaaggtttgtcccttacttttctttgcctcagtttctccctatagaaaagaaagctagtatctttatgcttttcttcctctctttccctcaaaaccccccttccctttccttcaaggagagagatcttaatagccccaggattagggaaactagagcctcattaggattattggggcattaaacttaatccttctccctccccagagacagcagcatgcctccacctctttacctgtaagtgtcttgatctatgttcaccagatgagtcctgaggacagaaaacaaaaaagcaggaagcagtctgagttcgttccacaactccacttcctttgtccccctctctgaatattgtcccagtcttcttcccaaagtctcattagcccttagattctcccgggtgtcctagagcacttgacccactgggtcacagccacatccacaccccacccccactttacttttcaggcctcccaatcccacattactttggttggggttggggtgaatcacctacaacataaatttcttaaagcccaggatggggacgctgacattatagtcttccagttcaaccccgattcttcttcgacccaggaacttcagcagccctccaagtgctcgaacctgggaggggatcagcagtggaatcggggtaaatcttaaatctcctgggggctgcagagcaccagggaaagttactattttccagggctaggccagtacctcccagaattcagccctagcacttgtgccgcctcccagcccttatcccccaggaccaatctcactgtgaggaggcagtcaaagggaataatggaagagaggaagaggattttctcagtggcagtcatggcgtctgggatgaaggagtagtttccagaaaggaggcgttgtttgcttatctccagacctatttgagggaggcaagcaaagggaacggtcttgtagctcaattttttcaccccattttaagaatgagacaatagaagcaagagagattatttgacttgcccaagctcacacaggcagttaatggaaagctagagcaagaaccaaattttcagactcttagtctaattctctttttattctacatataatataaagatacttgtctgaaagcacagcctgagaaagataaatggctgaggaaagtagacatctgtctggaattgaggattttggtcaaaataatggtattaatagaactagtaacactaatgccttaatatctaattaggatagtacactcctgttcttattgtaaacctaggaaagttatagaagtgccttatggatcataataagggtcactgaggcagtgccttttggtttggtgataaaaggctttaacttaatggggagaattccaacaataaaaccctgtccaaaaagtgtcaccactcctcaggggaggccctcatccctagacatgacttaagcagaggcttcccaataagctgcaggttattaaagggtagggagcaggagagatcttggggggacaggtcatagggcatgaggagcacaaaggtttaggatgacataaggcagaggggagatctgtgatgatgaaggtagagttgggggaaagaatgggacaccggaacagggagttaggcaaagcaaaaggaaggagataccaaaatccacacttggcaaaaatatgatttcaggtcttttaggctctctgtgctcctgggaggctgtgggggaggaaagaaaaggctatcattctttacatctcagtccttctacctctgtctgacactccctctcacccaattctagccccctggaatattccatatattagtccttccccattttccctctatcctttaccaagtccttaccaagctttcccagaaatcgagtcatattctcatcctgtttggcactcgtaacaacagactggggattgatctcatccagaacttggaaggagaacagagatcaaatgagttaaaggatctttgtctttgactaagagaaaacccatagccctcctcttcctacccctctccttctcaaaaacatttcctccctaggagtagggagtgctctgcacagtgggaacacaggtagaagttgagatttagaaaagtagttaagagtggtgggatggtgagagggaagtgggatgttctggatgttgtcactaggctgtaaacccctggagaacagacatgactgatttgcccagggctgaatctgaagcacctgaaacattgtaaatacgtcatatatatttgtggccaggcacagtggctcatgcctataatccctgccctttgggaggccaaggcaggcagatcactggaggccaggagctcaagacaagcctagccaacgtggtgaaaccctgcctctactaaaaatataaaaattagccaggcgtgatggcagattcttgtaatcccagctactcgggagactgaggcaggagaattgcttgaatccgggagacggaggttgcagtgagccaagatggcaccactacacttccagcctgagtgacggagcaagacactgtctcaaaaaagaacaaccaaacaaaccaaaaaacaacctcacaaatatttgttaaataatgaaatgaattcataaaaacaaaagagggagcctctgtgaagcaactgtaaaatatattgagtcagtgctatagtttggatgtgatttgtccctgccaaatatcgtgttgaaatttaatccccagtgtgatagtgttgtgaggtagggcctagcaggaggtgtgtgggtgatgggagtggatcgctcatgaacagattaatgcccttcctggagtgtgttggtgggtatgagtgagaggttctcactctattagttcctgagagagctggttgtcaaaaagagcctggcatctccctcccccttgcttcttctctgccatgtgacctctacacaccctgccttcccttcttccatgagttgaagcagtctgaggctctcaccagtgaagatgcccaattttgagctttccaaccatccagaaccataagccaaataaaacttttttttttttttaacaaattactcagagtcaggtatttccttacagcaacacaaaatatgctagacagtgaggtgagttaatgtaagtaaaacatggctgggcgtggtgactcacacctgtagtcccagcactttaggaggccaaggtgggcggatcacaaggtcaggagtttgagaccaccctggccaacatggtgaaacaccatctgtgctaaaaacacacacaaaaaactagctgggtgtggtggcacacgcctgtagtcccagctactcgggaggttgagtcaggagaattgcttgaacccaggaggtggaggctgcagtgagccaagattgcgccactgcacttgagcctgggtaacagagcaagactctgtctagaaaaaaaaaatatgtgtgtgtgtgtgtgtgtgtgtgtgtgtgtgtgtgtgtgtgtaacacatctgcaatcccagagagcagaggaattcatggttccatccccacctctctggagaagcttgaggctctcgtggtctggggcatctggcatgaagtggatagtggagtcactagtatcatagtaggcaatgcccaagtatcctgaattccacagcacacacagatggatctgtccagcaaggaagaaaggaaatcactattagaatcactcataagtgtagggtttaccatgtcttatataatttaatcattttctcaaatctctgagataggcatcatcacccccatttagtgaatgtgaaacagccactcaggaggtaagagacttgcccagctcttcccaaccctgttttttttttctttctttctttgagacggagtcttgctctgtcgcccaggctgaagtgcagtggagcaatctcagctcattgcaacctccgcctcccgagttacagtgattctcctgcctcagccttcccagtagctgggataacaggcacgtgccaccacgctcggctaatttttatatttttagtagagacggggtttcgccatgttgcccaggctggtctccaactcctgagctcaggtgatccgcccgcctcagtctcccaaagtgctaagattacaggtgtgagccaccgcgcccggctcccaaccctcttttattctaacttcccatcaactctccattcaagtttctactcccctcagagacctcggccagctcctcctcctcctcgacttcctcctcctcggcctccctggggcccggcactggggccgggctggggaagccggaggaggccgccccaggtctcggtccctgcggtgtcctccttgggttcgctcctaaggaggccatgagcttggaggctctgcggatgcaaaaagtgagggcggttcggaagcaacgattcacagaggaggccggggtagggtggcgcgcagaatgcaaagcactaagtacttctgctacagggctgcggggcagggctgaggggcgtggagagctgtggacacaggaggtgaattctcgggtatttaactaaagtacagattgtgggaaactccacgcgccccaccctcattcctgtcacgcggaggttaccctttggaaggaaggggtctgagggccctgtggggcgagtcgtgcacgtcttatgtctctgcctctgccaaccacgcgccaggaccccagcctcacgcgcttatcttcctcctcccccagctgccgccatcgcagcgttttcccgccttttcagtaacctgagtcgctacaggtgggagaacgccccgctgaccgaccgccacgagcctgcaaaaggagcgcgccggcgcgtgagcgaggtgcgcgcgcacgcgccccgccctcctagccgctgttgattggagaggcccggatccagcctagagatccgacagggcgaggaggagaagcggactgccgtagctgaagagtctggacgctgattggcctatttgccttcggggcgggtccagaacgttcaaacttcccgccctctgccgttgcttagcagccgggcctctagcactcactgtttctgggatttgattggcgcagtgggaagcccgcgagaaggtcggaccagggtccgtagtcccagtccctggaaggggtttgggaccgttgcgggggttttgagggggaggccaaacttaaagagccagaggcgcttattttttttcctgcaacaactcttaagttaatatttgtaccctctgagttaatatttatacagagcttagaacagtgcctggcaaacaaagtaagacctaaatgagcggtgtttcaaataaataagcggaaacaagcaggacttctgtctcagccctaccgtgcctgtttcctgggtacagggtatgaccacccccataatggcacgacagggcctaatttattatttaaacccttcaagcagaggtggaagcattcgaattacatcaaattctggcagagagaagtagttctgatcagaacactcacacccctactgggacatgcccataccccttcgcacttctacacacccctgaagacagagaggtatctatcattcatgcattcggcaactatttagtgcctattttgggccaggggttggactcaaagcggtgaacataatgaagtcactgctccataaagcttatttgtgtgtgtgtgtgtgtgtgtgtgtgtgtgtgtgttgcgggggtggggttatgagggagaaagaaaaaaaatatatatatatatatatataatccctttaaatgcaccatcctccccagctttgttcctagtaccctgagatggggagattcctccccagccccccaacccaagaagttaggaaagatggtgggggtgagatgacctagctgtgctaaccagtaattggaaaatcccctccagcaagaaaggtgggggaacagagttaagggctgggttaatggttacccctggcaaatctgttgagcaatggagctatagaaacttggaggaggttggtgacagctctggggagtgtcagggagggacccaccttccaatctggggtgtgaagagattagggactagtttaccaagcccaggaaggggagggagtggaaagagaagcccagagagggaaagaggagctactgagataggagaaatgcagggacagggaggtgagatggagggaaacctctgttgcaggatttgggggtacagccctggctctgctggatggttccaggagagggcagcgttgcctgtcacctggtaaattaaggcacgataccctgtgggtagtcatgccagccagccaaagtcaatattgatatcaaggcagctgtagctataaagctgtaggagagaaaagagaggccgggagaggctgccaaacctgtttgatcttcaagctggccccatttacctaaggcttctcttggacacagaccagttggaacaggagaggaccctgagaagtagagttgttttgatcccctcccctcaatgggaaggggtcctgtgtgcagattttgagggtcaccatgagggaattcacacccacacagaggcatggaatcatacccttacaggatgttacagttcaagggaacgaacaccaaagatagcctttctgtcgggaggagagaaaaaggccctcccacaagcaggagaaaacccacagaagaggaagcacaagaggaaaccaccaactgctggtttccagcagcacatcacgtcactccaccccactcctcccccaagtctctccctttctttaagtttcaagctctgttttagttctgtgttcttgcactccaccatggttttctggaactgtaggtcttttgttggacagagggtgatgaggaggatagagaagggatggttggacaggagagaaattcaggatatggaggctggaattctgggtttattttttcagcaggtcataaaggtttaatagaaatcaaggttactggagagagagctgctcctcctatgtcctccctgcttatttatttaggtgtccccaaggactctactcccactattctgtctgatctttctttatccccatgacaggaccagctaacaacacccctaccccaccccctatacacatacttcaggatcgggccatgataatcccacccctctgccccatctccaaggcaacctgtcagtgagacgaggacaaagggcacaggaaggggccccaataggaaacataagtggaagcacaaagctgaccaagctacaggaacagacccctccctgcaacaaagccccttgcctcggctttatgtttccttcgcaaaagacttcgtcatctcccttcccatccctaactctactttctttttcttttcttcttcttcttttttttttttttttttgagatggagtttcgctcttattgcccaggctggagtgcaatggcaccatctcagctcactgcaaccttcacctcccgggttcaattgattctcctgcctcagcctcccaagtagctgggattacaggtgcccaccaccccgcctggcaaatttttgtatttttagtagagacagggtttcaccatgttggccagtctggtcttgactccctgacctcaggtgatccaccccccttggcctcctaaagtgttgggattacaggcgtgagccacctcacccggcccctaactctatttcctatgcccaatcccaagtgtaggccacaaggactgcaagtcctagtgctgagctgggcccggagacagtagactgcggggggcacaggacctactgagacaccagtctgggcagctcagggagtgctggcgtcaccccttccctaatcccaggctgcatggctaacggttcctatctgcagtcccagccttccacttccgagttcttctctcagaccacagtcccagcaacccagaatttggattggagtctggaagaaatgcagaatgattaaacgaccacctttccatttgaagtccccatccctgaatcttcacgggtgtgcccaagctgttagtgtcaagttttttatatgagggtcagtcgggttgtactcagattaatgaagcagggaaactgaggcagaaaagagtcctgtgttcaggagaggtcggagaaacaaggaggttttcaggactcctccttaacacccccatccccatcctgtgggagatccgaggattccccttccggactcactccctacatcgtcgagtcccgcccccctccagtcccctccccaggttcagggcggggccggtcggtgagtcagcggctctctgatccagcccgggagaggaccgagctggaggagctgggtgtggggtgcgttgggctggtggggaggcctagtttgggtgcaagtaggtctgattgagcttgtgttgtgctgaagggacagccctgggtctaggggagagagtccctgagtgtgagacccgccttccccggtcccagcccctcccagttcccccagggacggccacttcctggtccccgacgcaaccatggctgaagaacaaccgcaggtcgaattgttcgtgaaggtaagaacacttctctcctcagccacccaaattcctggaagccaactctcacctttcccccggtccagccttaactccccaatcccttccctccttgactcccacccccaatcccacgtgcactctttggttgaggggtggttttgagaggggaagacattaacttgttagcaagtaatgagaattctaggatcaaccctgaaaagtttgtaaaagtgcaagtttctagcagactaaaggaagggaagtggagaaaaaggagaattcccaaaagtgagactggggtggggttagagggcgagctggtgaagggacagtgggggcccagcagggtttagaagggacagaggggaacctcagttaggacatgtgtccctacaagatctgagggtgagtagtgcagtaggagaggtgtgtgtgtgtgtgtgtgtgtgtgtgtgtgtgtgtgtgtgtgtgtggatggagacgcttcagggaagacggtgtgttgagggaggcctgagagtgagagcaagtaaattgggaagctttggaggggcggaacaaaacaggagactgggatcggagtttgaaaagcagagctggagaggtgatcgggtggcattgaatatccccaggactggggaaagggacagaaggggaggtggcaagaagacgtgagtttaacgtagctaccacaaggatgggtgggagagagatcagacggaggagaagagctcggttagggcattttgggatttgggggttggagaagtagaagacttgccccaactctctcctctctctgcgggtgtgggtaaggagagatggtcctatggcatttgggtagcaaaactgcaggcagcaggcttctcggtgtcacccagcccccctctgattgcagcggccgctcccctccctaccgctgctgcattcatttcccagtcttgggacctcctggctgtgcccctccctcccttccttaacagtgtcctcttctccccgctccgtttgtgtctctccgttggcacgcacgtctccccactctccactttcctgccgcctttctttccccttccccccttttgtttctctcatctttgtgtgtctctgcctgtgtctccctctcccttctgcttgggtttctcgggcagccattccctctccctgggcccagggaagtcggagcctgcttgggtccgcccccttaggtgtggtccccacctcactctcacattcgcctccggggctatttttactcgtgggtgaggctgtgccgcagagattccggccctgtgtcctgtgagaggatggttattgcagtcagaggacttgtgctgggagaccctggcagcaggttaggggtagccttagctgcccaggcctcatcctcactgtcccttcccccacatccttgacaggaaggaagccggagacagagagatgaatcaccctcagcttagggggaggtgtcccttgggccaatgaggtcaccacttgctaattagagggcagcccctctctgtagggccctccacatctctagcgcgaggcccagggccccttgactagactccccacccaaagacaccttggattggaggtgtagagaaccaaaactctggctcccaaaccccacccacctctcctgtcttcagactctactcccttcaggaacccagaaatccaggcttctagcctacaactctggcctcactgaagttccacacccttccctctctaggattcagatcctcccaagttctccaggacctcctccctctacctacctcccacctgtcctcagtgtctggggaaccagaagcctgcctttgcaaaacagtttcccattgatctgccttaggtttgacccaggcccaagggcaaagagcccatagtgaggggacagtgtatgtgtcatgactaggcagaaaacagctggtctgggagtgggaatgcagggactggcctagggatgggtggggtgcatcaggcataaccttgggttggggttacttttcaggctggcagtgatggggccaagattgggaactgcccattctcccagagactgttcatggtactgtggctcaagggagtcaccttcaatgttaccaccgttgacaccaaaaggtaggcctgcttatgttccttgaaacacccctggtgtacacatgtgtgcaaacacacacccacccgagtccttctgtcatgaacatttttgccctccccctggagtccctttcttatcccacgtcctccattccccctttctggttcttcctgacccccatttccagtcctgattcctgatcctttctccaggcggaccgagacagtgcagaagctgtgcccaggggggcagctcccattcctgctgtatggcactgaagtgcacacagacaccaacaagattgaggaatttctggaggcagtgctgtgccctcccaggtataggggcactcagaaagtggagaggtggagcagggagattctgggaaacagacagtttgcagaaatggaaaacagagatggtggtggggctggggcaggagagctagctgaggttcctcccaggaagacatcttacctcatttttcccattggctttcaggtaccccaagctggcagctctgaaccctgagtccaacacagctgggctggacatatttgccaaattttctgcctacatcaagaattcaaacccagcactcaatgacagtgagtcttgtgggtcagaggcctgggtcctgggaggaatagagaggacccagcgggtaggagacattaggggcacctggacgttcagatatcagggagatgaagcagatgttcgtaaatttcccccagcttcccatttttgctttacctctatatttccctgcattttcattggccaagacttttaagcttttctcatttgttccctagcctcttctgccccactgaggacgttagttggctgctggcctgttttctggcagaatagggtcatgcttaagaacagtcatcactctagatccagactacctgagtacaaatccaactagccgtataattttgagcaatcatttcacctctctgtaagtccatttccagatccacaaaattaggatgacaatacctatttcatgggttgatataaatttttttttttctttttttttgagatggagtctcgttctgtcgcccaggctggagtgcagtggtgcaatcagctcactgcaacctctgcctgccgggttcaagcaattctcctgcctcagcctcctgagtagctgggattacagacgtgcatcaccacgcccagctaatttttgtatttttagtagagacagggtttcaccatgttggccaggctggtcttgaactcccgacctcaggtgatccacctgcctcggcctcccaaagtgctgggattacaggagtgagccactgcacccggcgatataaatgagtttgtaaaatgtaaagtgttcactttgggaggccgaggctagcgcaccacctgaggttaggagttggagaccagcctggccaacatgactggtctctactgaaaaaaatacaaaaattagccagttgtggtggcaggcacctgtaatcccagctactcaggaggctgaggcaggagaatcatttgaatctaggaggcagaggttgcagtgagccgggatcatgccactgcactccagcctgggcaacggagcaagactccgtctaacataaaataaaatgtaaagtgcttagaataacacatagaaaagtaactacatgagtgttagctattattattttggactcaccattagtatccacccccaacgggccttttcggactatgtcaatcttttcctgaagttctaatcagttccctctcttgcacagatctggagaagggactcctgaaagccctgaaggttttagacaattacttaacatcccccctcccagaagaagtggatgaaaccagtgctgaagatgaaggtgtctctcagaggaagtttttggatggcaacgagctcaccctggctgactgcaacctgttgccaaagttacacatagtacaggtgtgtggttattgcgggaggagaggatgaccactggagtggccctttaaggagctcccacatgggcttcccctgacaaccactctaaagacgatttctttcttagggtggttttcataaattgctaccaatggcagaccccaccccagtcctttgcagcagtcattgctaacaagaccactgcttgagataattatattccatgatgtaagtcatgggtgcaaacagactagcaaagaggaatacatcccagtattacttttgaagaatgctcttcctgtctcggtatcactgccaaattcccagattagacagagcaggcttttcctaaagtcaaagctttaactttctttataacttcagtcttcacttcctcttgtggaagatcaaaactgctggttcccatgtttttgtcatagtctcaaagctatggtttagtttgtgcaacatgggcctgacatcagtctgccacacaactatgtagtgaacatctgtgtactaagcattgaaagatacacaagtgtatggtgactgggccttgctctcaaagggttgaaatctgagacaataaaatattcacatgaaagttaagaatatatgatgaaaagtcagatgggccgggcgtggtggctcacgcctataatcccaacactttgggcggccaaggctggtggaccacctgaggttaggagttcgagaccagcctggccaacatggtgaaaccccatctctactaaaattacaaaaattagccgcacatggtggtgggcacctgtaatcacagctatttgggaggctgaggcaggagaatcacttgaacccgggaggcggaggttgcagtgagccaagatcgcgccattgcactccagcctgggtgacagcaagactccatctcaaaaaaaaaaaagtctgatgaaaaatatagagacaaaagtcacctgtgtcagtgcctgaagtggtatagggggaaaaagtcactgtggaaattcaagaggagaattttataagtaaattatatctcaagttttaaaaactcaggaaaaatggctggttattaaaagccaggatttcagtaagtgagaaggaaggctaacgacagtacaagacagtgaggagttgagctggttttatcatgtcggcctggggagaagggaaagccaaggtggcttccctgggtctaacatgttggtccctctcctctccccatcctcaggtggtgtgtaagaagtaccggggattcaccatccccgaggccttccggggagtgcatcggtacttgagcaatgcctacgcccgggaagaattcgcttccacctgtccagatgatgaggagatcgagctcgcctatgagcaagtggcaaaggccctcaaataagcccctcctgggactccctcaaccccctccattttctccacaaaggccctggtggtttccacattgctacccaatggacacactccaaaatggccagtgggcagggaatcctggagcacttgttccgggatggtgtggtggaagaggggatgagggaaagaaatggggggcctgggtcagatttttattgtggggtgggatgagtaggacaacatatttcagtaataaaatacagaataaaaatcaagtgtttttacgcaatgggggtttaaagtgtgggcgacatggaatgaggggtgggtcagtgatcttgagctcagggcagaagccaggaattaagaagggaaatgtttgtggtggggctgctatgtttcgtgccggtccgccggtccgccgttgcgctgttctgaggtctacgaagcgtttgcagccccgtcgccagggccggccagatctgggtgggcctgggcagcgctcgctgggcggtgccgatttctggcaaggggggcgcagtctggatgtaatgggcgcggcttagcagggcggaatgggcgtggcccgaagaagccccgccccgtcccgcttagacaatgccccggagccgccagaccgtcgcgcccctgccccatcgtagtatatgagctcgcctacacaaggacccccgctaaaagccagagctcccagtccccgaggcttgaagacggggactcccttctccaccaactctgtcctcggggggtggggccccagccgagatcacagcgcgacaggagtgggggtggccgctggaggtgagtcttgcgtggggggccctgaaccgtgtgggggccggagtttgggggtgccgggcccatgcctgcaccagacagagagtatggggagccggtatttgggcgcggagctaggcggggtggactttgggacatagacggggaaccgggtcctggagccgggagtagtgccagcgccccggaaccacgccccctgttaccccgcccctcgcatttcgttttagacctctcccagtccttcgggactcggtctggtttatactaggtcgtgctaggggcagcgtgaccagccagggcggagagaggatgcttaactccttaggctcgaactcctcccttcctacccacctctctcccttctcgttcgggtattcaggacttccattccccagcccctgcctctccagctttctccttctgtcccataacccctgcgggtcccgggctggacttccagtccctgcggtagcgagcagctgagggttaagggggcggggctgctgcatttttggggagtgagcgcatcctagtggctgccaagaggggcgcccgacagggacctcacaagcccccaagcaggggcaacaggtgttttggagattagagaccctagccttgttcctcaggctcctcttaaagaatctgacccctgagggtgctgggtagagtgaggtcgacaggagcggaaggtctggagtgggtggggcggagtgggagggacgcctagagatggcaggaggaagacctgggcgctcttaaccacccccaacgcccttgtctgcatgtctttttctctgtctcctccttttctgtttcttctcccagacaggtgaagaaacaagaaaactaagaaatccgagcggttggagggggagtctgtgtggatgggatggggacgccgggggaggggctgggccgctgctcccatgccctgatccggggagtcccagagagcctggcgtcgggggaaggtgcgggggctggccttcccgctctggatctggccaaagctcaaagggagcacggggtgctgggaggtaaactgaggcaacgactggggctacagctgctagaactgccacctgaggagtcattgccgctgggaccgctgcttggcgacacggccgtgatccaaggggacacggccctaatcacgcggccctggagccccgctcgtaggccagaggtgagcgccgtggcgcgggtgtggtatggggaaaggcagaaggaactggatgtcggggctttggggaagaattgaggatgggggtgtcacagctccgtgccctcttctcctatcctaaggtcgatggagtccgcaaagccctgcaagacctggggctccgaattgtggaaataggagacgagaacgcgacgctggatggcactgacgttctcttcaccggtgaggctggggggaggcataggtcttggcacagggaagtagagtttgggagactcggccgtctggagccttgtttctaactcactcccgccctcaaacctccgcggcctcccggactcaggccgggagtttttcgtaggcctctccaaatggaccaatcaccgaggagctgagatcgtggcggacacgttccgggtgcggagcgggaccagcctagggagggagggggtgcaggtgggggtcggaagggcctgggcgcccgctgaggaaatgagaggcagagagcagcctatgtttgaagataccccatcacccctcccgcgcccctgaatacctcccttcgctctccctaggacttcgccgtctccactgtgccagtctcgggtccctcccacctgcgcggtctctgcggcatggggggacctcgcactgttgtggcaggcagcagcgacgctgcccaaaaggctgtccgggtgaggagggggcggggccaacgaaagtgggcgcagttctgggcccgggaggccgggagctgggaggcttaggaaattagccctaacccctgccctcaatgggctgtccatcttacatgaaagaacacaggagaaaataagaagttacaacagcaggactgggaacaggggtgattaatttgctcttccggagtttcaggaaaccccaaaggtggcacctaaactgtgactctaaggatgggtaggacagataggaggggctggggaaggtagggggttgaaaataactgcatgtgattccaaggtggaaattagcaaaggtaactaaagtacttagtgtctgacatatcgtaagctctatgtgcttgctgtcattattttccacaaatgtcagtccgtccccagcccttagtggtggttgagcaggcagacacagctgtggagaggttctgagactcgaacacttcctctttcctctaggcaatggcagtgctgacagatcacccatatgcctccctgaccctcccagatgacgcagctgctgactgtctctttcttcgtcctgggttgcctggtgtgccccctttcctcctgcaccgtggaggtggggatctgcccaacagccaggaggtgagagagggcaggaactccaacaccaagcaccatcagagaaaagagtttcaggctttcctagtgggaggaaggaagggtaccttctctagaagcctgggtggggccactctgagctggctggaagagtggcctggctcagcctgaggtctcactcccctctccccactccatgtcttccctgtgcaggcactgcagaagctctctgatgtcaccctggtacctgtgtcctgctcagaactggagaaggctggcgccgggctcagctccctctgcttggtgctcagcacacgcccccacagctgagggcctggccttggggtactgctggccaggggtaggatagtataggaagtagaaggggaaggagggttagatagagaatgctgaataggcagtagttgggagagagcctcaatattgggggaggggagagtgtagggaaaaggatccactgggtgaatcctccctctcagaaccaataaaatagaattgaccttttagactgggctgtgactggtgtcttactggggcaaagggatagggcagggctgaaacctgagtttggggtcagtgcagggaagaaggcctcttattcaaaaatcttgttaggtacttatcaactcattgcccaaccatgtcataggtacttgagcacaagatgaacaagacagaatttctatcatgggaagtgtgtccagggcagagaaaagagtgtatgggtggattgctcactgaatttatctaaatgttagatgattcagagactggtagattaccagtccacccctatttgataaagaaaaagaaatgacacttccagggacattcattttcattcattcatttaatgaggcttagcaatgatatcaaaagggtcagtctcctgacgttggggagctcacagtacatgcaaatttcttacaaattgaaatacaggttgtcatggaacaatttacagaaggctgtttctatgagggaaataaagggggtgtgccctagggcatcaaagtatatgcaaggggtggccaaggagggtcaccttcccagaaaaggccatacttgaactaaggataaataagaattagccaggcagatagtgtgaaggagggaaaggggtaatacaggaagaaggaattgcactgggcaaagacattttggggctagggagaattctctaaggctggcattttctaagatgtgcatgtggaatgacacaggtaagcctggagagtggacaaagtgctgtagtaccttgtatccaaagccaaggcacgtgggcacagagctgaagctaaggagagtacttcagttctgtaataagggctgtcaggagcagttatctcttgagtaggatctctctgacttcagggaggaaagcaagggtaggaggatgaggtggggctatgggtaatccaggaaggaagtgagcagagtacattcacgtggcagcgctgggcatggaatacagtgtgggtttgacagtgatgttaagatagaaagactggacttcatggctcattgtgtgggagtaagagagaaaggaggtctgcgtgactcccagtttctgggttgggcaactgggttgttaaagagaatacagaggagaattaagtgagcagcttcagagatgacaatgagttgggtttgacattcagagtgcgaaatgcctgaggtcagtcaggcagaatgtctaagtggaagtttgttaatcccaaatctgagatctgagccagagagagttctgagtgtcatttgcagaggagggggctgaggactgactgttgatgagagtgtcccagaagaagagaaagggacaaacctagaatggtgggaaatactgtagggatatggagcaaggaagaggagtccaaaaagaaaacaccagcaacaaagaaaaacagcttaaagaatcaggccgggcgcggtggctcacacctgtaatcctagcactttgggaggccggggcgggtggatcacgaggttagcagatcaagaccatcctggctaacacagtgaaaccccgtctctactaaaaatacaaaaaattagctgggcgtggtggcgggcgcctgtagtcccagctactcaggagcctgaggcaggagaatggtgtgaacccggcaggcggagcttgcagtgagggagatggtgtcactgcactccagcctgggcaacagagcgagactccgtctcaaaaaaaaaaaaaaaaggagctagggcttgattgggtatagagaggacactggtggtgagggagacatggaggttataggagagatgggagtaagtttagaagtaagaccagtggcagagacagcctggaacccaggtctcccaactcccagtctagcacttatttctataccatggtgccttcctcttccaggtgaggaaccaaggaggggagagggattatggggagctgggatcccctagcttgggaggtttggagtaagggcttcccttcaaactacaactgcatagatggtggaggcatcagcagggtccgctgtggacagccggcggggcctgctgagggctagatggtccagatccgcatagagcaggctctggaggaggaaggggaggaagacaagatggtctccacagtcttccttggggttcaggcctttttttttttggtccattttcctcagagattctggctatccccttcccatccccatgcccttaccggttcctggtccaggtcccctggaatcttgggctcttcctcctttactggcctctggggctcggttttcacaagtggagctatgtgggggggacagagctgaaggatggagagaaggtgaccaacgtgtctgctcccagcaagggctcagactcaggaattgaggggtggggagtgggcatgtaggagaaagaaaatggggtggaattagtctcaccaaatctagggagtggtcgaatcggttgcgggggcaggcgcctgtaagggacatatgagtctttgagaaccaccagtcttgtctcactggttctcctgggactcgccacgccaaggacagcccagcaacttgaaggctcagaccggaaacaacttagactctaccccaccgacagtccagcccaggctctaactctgctgcacttccagctcatctgctctggtggggctctactcaccagccagcggcctcgctcccacctttgacctctcccattcttcgccaagccaggaccagagctctaggtctagctctttcttttgcgaaggttctggtcctgccccttccacctctggtcactccccatttaacgaggccgggtccctcctgctcacctgtgcagccaccagaccaggcccaaagctcccagtccgagcaccaacccagcgcccagcagcgggatcaggagctggggatacacggaccctgggggaaaggcgtggcggggagggatgctgaggtcaggggtttgacgagggacagccagcagtcccgctcaagaacccccagccaaggccctcttccctcctccgggtatgtgtcggagttaagtacccttgtgcgcacaggcctgcacctaccatgggtaggcccgggggccttgcaataggtcctgtcccccagcacgtgaagcactgtacggctctcgtcctcgtggcggcccttgcagaaaaaagtgcccgagtcccccgcgctcaagaggagctccagccgccggataccagagtccagggagcgtaggcggccgacgaaaggctggaggggaggcacggtgggggtcccgctcgaagaggcccacaggatcggtcggcgtcctttggacaggcccttgcaggccgggaagctgggtgcccagacccagcggatgggatgagagactcctccgcaggagagattcacccggtccccagggcggccgtccagagaagctaggagaggccggaggctgtggttagggcacgtccacagggcaagacgaccctccatcccgtctcctctttctcttctctgttctgcactccagccatcctggatcttcccacacacaacccaccctactaggcggcccttatcttgcttcagcccctctgcgtctatcacaactctcccagggatcgcttacccccagggttcccttgggccctcgagagcagcagcggtagcagctgcagaaacacagccatggttaggatgtggtgaggagaagctgcgagcgaatcagcggcgtggggccggttggggggggaccggagggaagttaggcgtggggagaacggaggggctggggggctccgataagagagggggcggggccaccagctgcccagatccctttgggaatcctcgcaggcaaactcggagtcttcaaatggttctcacttaaaatgtgtgctcgggccatttacacaaatgctttggcctgcttaacttttcaggtgcgcctgtaatcccagctacttaggaggctgaggagggaggatcgcttgagctcaggaggtcgaggttgcagtgaactgtgatcaggccattgcactccagcctgggcgacagagccagccagaccctgtctcaaaaacaacaacaacaaaaactcctgttttgtaggggattgtgataacgaaataaagtaatacatgtaaactgcttagaatacataggatcactatgtaagtgcttgccattattattactatttctattcttttttttttttttttttttgagtcagagtcttgctctgtggccaggctggagtgcaatctcgactcactgcagcctccggctcctggattcaagtgagtctcctgtctcagcctcctgagtagctggaactacaggtgcatgccaccacacctaatttttgtattttcagtagagatggggtttcaccatgttggccaggatggtctcgatctcttgaccttgtgatccacccacctcggcctcccaaagtgctgagattacaggtgtgagccaccacacccggcctactatttctattcttattttagcttctacctcacctctctgtgcccatgctgttcctcctggcttggtaccctgcccaagttggcaggttttgactggggaggtgctttggagcaggtgcacacagccacacctaggacaattgctgctgctggactggagcaacaaggccacaccaagcgcaagtggagcacgggtgacatcctgagaaccttcatgggagcctgaggcagccctacttagcagacctgtggtggctctcctggatgagtagccccagcccctgcctctgctgctgtggcatcacagaagccatcagtgagtcacttattgctgagcaggcattggaaagaccgagtgggggctgaatggagattaatttgacccattcctcccccaatttccaccagcatgcccctatcaatgcccagcagggacccagggacccaaattcagcaattaatttgggccacatccttttgtccattttccaggaaccagcagaagctgccaccatggacactgtaaatcacagaggcctttgatgatgctcattcagaggactgagcagcaggactcttagctggggaccaggaagggcatcttggcctgaaaccaagaaccacaatggcattggccactagtggcacctgccttcccccatccctctctcccatccctactccccactcagtcctgctcagtgccttcccaccccttgtcttttctctggtcagctgcgtagtaagtgagaagggaggggctaccagaggcagggaagggaggagcctttgggtttataaattccaaaaaggccactcaactcctagagctggatccttgaaaatctactctatcagctgctgtggttgccaccattctcaggaccctcgccatgaaagcccttatgctgctcaccctgtctgttctgctctgctgggtctcaggtgagcacctgggggccccaaagacctggtttgcctggtcaggacctttacaccctgctctacccacttcccggccctacccaccactcgggatcccaacacccccagccccaactggctcagctctcctgtgccaccaagaccaggcttccctatgacagcctccttgctctatttctcaaaaagccaggtctccatccatcctccccacctccaagaaagacccatttctctcacctgccagggctctgggtcccctgttccccactccaaggtgtctcctccttggaaactctggtatccagttccccaaccagccccacttcaatatgcaactctccagagtctagcttacctgccttctcctctatctgctgtgctcagtaaggtgtcctctcgaagacctaggcatccagccccaggctccttttgtaacctaccctccccatctactccatcagggactcacatgttcagtctctcagccatggcctttcctagataccccctactcccctcctgggttgcatacctcctcccatacaggggatacaaactttctagatggttgcagtgacatctaagagcctccatggaaacagagcgttttcttgagccttctgaagaggggacaactgggccacttacctccagggtgaagtggatttcactgaggtacacttaccaggctcttccaccctcggaccctgcgtcaccaaatcttgcctgcccaaaccttgaattaactgaagcaggaaacttggggtgccaccttctgtatccaccctctccattttgataaggtgctaagatggaatctggtgatctgtctctcaggtatcattcctttctgctgaagagctactggggtgagaggattctattcaggtctggttcctcttgccacactcttgccagctccaggaggtgaagagtaaattgtaaattgctaaagctggccacagatggctttctcgccagcctcaagttccaaggcatttctgacagtgttgtaaccctcatgattttcatttttattatttctccttct

SEQ ID NO: 220 - DNA, 1250 bp, Homo sapiens
gttcagggcggggccggtcggtgagtcagcggctctctgatccagcccgggagaggaccgagctggaggagctgggtgtggggtgcgttgggctggtggggaggcctagtttgggtgcaagtaggtctgattgagcttgtgttgtgctgaagggacagccctgggtctaggggagagagtccctgagtgtgagacccgccttccccggtcccagcccctcccagttcccccagggacggccacttcctggtccccgacgcaaccatggctgaagaacaaccgcaggtcgaattgttcgtgaaggctggcagtgatggggccaagattgggaactgcccattctcccagagactgttcatggtactgtggctcaagggagtcaccttcaatgttaccaccgttgacaccaaaaggcggaccgagacagtgcagaagctgtgcccaggggggcagctcccattcctgctgtatggcactgaagtgcacacagacaccaacaagattgaggaatttctggaggcagtgctgtgccctcccaggtaccccaagctggcagctctgaaccctgagtccaacacagctgggctggacatatttgccaaattttctgcctacatcaagaattcaaacccagcactcaatgacaatctggagaagggactcctgaaagccctgaaggttttagacaattacttaacatcccccctcccagaagaagtggatgaaaccagtgctgaagatgaaggtgtctctcagaggaagtttttggatggcaacgagctcaccctggctgactgcaacctgttgccaaagttacacatagtacaggtggtgtgtaagaagtaccggggattcaccatccccgaggccttccggggagtgcatcggtacttgagcaatgcctacgcccgggaagaattcgcttccacctgtccagatgatgaggagatcgagctcgcctatgagcaagtggcaaaggccctcaaataagcccctcctgggactccctcaaccccctccattttctccacaaaggccctggtggtttccacattgctacccaatggacacactccaaaatggccagtgggcagggaatcctggagcacttgttccgggatggtgtggtggaagaggggatgagggaaagaaatggggggcctgggtcagatttttattgtggggtgggatgagtaggacaacatatttcagtaataaaatacagaataaaaatcaagtgtttttacgca

SEQ ID NO: 221 - protein, 241 aa, Homo sapiens
MAEEQPQVELFVKAGSDGAKIGNCPFSQRLFMVLWLKGVTFNVTTVDTKRRTETVQKLCPGGQLPFLLYGTEVHTDTNKIEEFLEAVLCPPRYPKLAALNPESNTAGLDIFAKFSAYIKNSNPALNDNLEKGLLKALKVLDNYLTSPLPEEVDETSAEDEGVSQRKFLDGNELTLADCNLLPKLHIVQVVCKKYRGFTIPEAFRGVHRYLSNAYAREEFASTCPDDEEIELAYEQVAKALK

SEQ ID NO: 222 - DNA, 26214 bp, Mus musculus
  misc_feature (1)...(26214): n = A,T,C or G
cccctgagagcccagggagctgcttctccaagaccccttgcagtgggcttcgtaatgaacctgtgtgaaacaggtttgcagagctgcctggtgcctgcccggagccctggccaggtatggggagtagatgggtgaccagaaggatcctcttcccaaaaggaacagagaagggacgcaggctgtggagagagtgcctgctgtgcacgagtctccatcctcaggacccagtgaaaagcaggcatggtggcaagcacctctcaccccagtgctggggaagtgggcagcaagacaggagaatgctgaagctcactggttagctcactggtcaattggtgaagaccctgactcaaaaatgaaaatggagaatgatataggaagacacttgatgccaatctctggtctccatatgcatgcatgctcgctctctctccccctctctttatctcttacacacacatacatacacacatacacatgttctctcacacacatgcacatacacacatgttctctctctcacacatgtacagacacatgttctctcacacacacacatacatacacacatgttatctctctctctcacacacacacacacacacacagagcttattcagggacattacctacccctgagctcagaaggatggttcctgtcctgacacctctctgtgcccacactttcccctaacctgggcatcctctgtgggaaggctggctccaactagcaaaaccaggctgactagtggggaaactgaggcagacattaagtcagagccaagactgacacttgaacccactgcattctgatcccaagtcctgtgagaacactgcagatgctacctgggtcccatggctgtttctatggtagaggcagccatgtcctggggtatggtcattgtgtggacatccgtgctagtttgatgcttccattgctctttgaggcagggtctcatgtagcctagattggccttgaacttcagaccctcctaatcccacctcaggagaatgctgtgatttctggtgtgcactagaacgtctggtttatgaggtcctggggtcctatccagagcctcatcatgctaggccagtactccacccagctttcctgcagcacagcggagaccacactcttccaacaggagtccgcttcccagaccccttcctttccttctgtcatccatccccctacccaggcctttgtcatgggtcatggtttcctcgggatcgacccaaagctcccacatgacgtgtggttgtaatagactggaggagaaagggttgcttcccacatagagccaggcctgtaacaaacgacttaagcaggcgcccctgctctgggctcacactttgcggtttcagctaccagacatgtgcttttctgggaatgcaggaaactggttctgccctttgaagaagggtgactgtggtgtctcctatgtctggcgattccagactactgctggacaccttcctggctctgggctgtgaatgagatcagctgctgaaccctttgatgagtctacttcttcaagggacccctaaaatcaaaggtggccaccttcactcagcccatacaggacagaggtggttcccaaccccggaaaagccaggccaggacccagccctgataatcagctctgtggctttatcaagccagagcctctctgtctgtctcttgtactgtagttgtgaaggaactacaaaaattaaaccaggctgaagctccagggtagtggtgcttatttataatcccagaatctgggaggtggaagcaggaagatcaggagtttgtattaatagctacatagcaagtttgaggccagcctgggctataagagaccctgtctcagagagagagaggctgggggtgggggtaggaggtggctggagagatagctcaacagttaagagcacttgctgctctttccatagaacccaacacccacttcaggcaacacaaaccacctgtaactccaggtccagcatcccttctggtttccttgaacacttgcacacacatgaacacacaagcactctcccatgcaacacacacacatacacacagtctttaaaacacacacattcactgaatacccatgctcttcttgtccacaaaagtcagtcatgccgggcatgttggtgcacatctttaatcccagcacttgagaggcagaagcaggtggatttctgagttcgagcctggtctacagtgtgagttctaggacagccagggctacacacaaaaataaaacaaaaaaaagccagtcataattttgtgtacttcctctgcatgagtcacacactgtaaacacagtgcacaattagttgagagcacattctatataagattgtgagacttgggtcgggcatggtggcgcatgcctttaatcccagcacttgggaggcagaggccggcagatttctgagttcgaggccagcctggtctacaaagtgagttccaggatagccagggctacacagagaaaccctgtctcgaaaaaccaaaacaaacaaacaaaaaagccaacaacaacaacaaaaaaagattgtgtgacttacattgtgtcccttcacatgacctcgtgctgtttgccataagcataaaaaccaaaacaaacaaacaaaaaagccaacaacaacaacaaaaaaagattgtgtgacttacattgtgtcccttcacatgacctcgtgctgtttgccataagcaccctcattcactgagcaaccctgttcttgggcatggagagcttatttattcttattttatgcatatgagtattttgcttgtgtgtatgtctgtgtgtcatatgtgtgcctggtgcccacggagacaaaagaagggtcagatcccctggagcaggagttacggacagctatgtgttgctgtgtggtgctgggaatctaatccaggttcccccagaagaacagtcagtgctcttaactgctgactcctctccagctaccttcactgtctgtttgtttgtttttcgagacagggtttctctctgtagccctggatgtcctggaactcactctgtaaaccaggctggcctcgaactcagaaatccgcctgcctctgcctcccaagtgccgggattaaaggcgtgcacccggcctatgttgaacttctgatccttctgtctccacctaggattataggtgtgcatccccacccctggtttgtgtagtgctaggagttaagcccagagctctgtgggcatttggataagtgctgccactaagctacattccaccctccctcccatcccagtaccatgccccgctaccttcacttttaaaaacaggctcttgtatgtagcctaggctggcctgaaactcagcgacatagatcaggctggcctcaaatttttactagtcttcctgtttgacttctgcaatgctgggagcaaaagaaggtccccacactcatcttgatactgttttgggtttgttgttgtttaagacttatttattttatgtatatgagtacacgtagctgtcttcagacacactagaagagagcatcagatctcattacgggtggttgtgagccaccatgtggttgctgggaattgaactcaggacctctggaagagcagccagtgttcctgactgctgagccatctctccactccttgtgttttgtttttgtttttgtttttttcaagacaggatttctctgtgtttccctggctgtcctggaactcactctgtagaccaggttggcctcaaactctgagatccacttgcctctgcttcctgagtgctgggattaaagacgtgtgcgaccaccacgctcttttgatttttggttttgattttttttctatataattactttctccagctagtgaacatgtgtaataataataaaatctttgtagtgtgtgtatgtgtgtgcgccagtgtctaaatggaggttcagaggacaacttgtgaaagtcagttctcttcattcttgtgagttctggggatcaaactcgggtcttcaggtttggtgacaggtgcctatatccattgagccatctcgctgactccccaagtgaactggcagttgtgctgagggagcctgtcttggacatcctggtgttggggaccttggtgaaggcaaactgcttgctaatttcttttaaactgtgtaaggccgactccccctttcagtgagcttcaaaaacaaaacaaaaaacaaacaaaaaaaatgagaacaatttggatggagcatctgggctagtgctcataaacaagtcagcctcgctcacccacacctgcaggagtcacagaccattcctggtcccctcctgccgagtccttcgttctgttctccctgctggctgttccccaaggctaactgggtcctgacgacttctcacataggggctttgtgtctgggtttgagctttgcattcctagatgggacttttgtgcagttctgctttttgttgttgtttttggtggtgtggacttttgagacagggtctttctatgtagacctagctatcctggagtttgcaatgtagaccaggctgtccttgaactcacagagatatgtctgcctcctcttcctctgagtgctgggatcaaaggctcgcaccaccacacccagcctggctccagggatttgagtctggtctcttatttcaacatgtctgtgagagcctctggcagtggtatgtgggaccagtggctgagtggtgccaaaagactgtgtgcagcttttttgttggggagggggaggggaactggcctggagcttgctttgtagaccacgctggcctcgaattcatagagatcttcctgcctcggcctttaaagtgctaagattaaagctaaggccgccacgtttggcactctgcacggcctctttatctctttcatcagtggacattaggaagagtctatgttcttctggtcacggtgctgccaggggacattcatcagtgtccttgagtgaccacagggttgcagctttgtaacccaacatttactttattttaatcgtcgagacaaggattcatgtggttagcctcaaattccccgtgtagccagagatgaccttaagtttctcttgcctctgctttctttgatcacaggcaagtaccacaatgcccagttcacacagtgctggggactgagcccagggatttgtctgctaggcaagccctctaccaactcagctacatctccaatgcctataacccagtttctaaaggtgctgcctacaaggcagaaagtttcccaggaagctgggtgtgggtgacaaatgtgggaggctgggacgggagaatcaggactttgtagccagcctacacaacatagtgagaccctgtctttcaaaagcagtgctagggaagtagcttgtttggtaacagtgcctgcctagcatgcagaaagccctgagtgggatgcccagtagcacatgaagccagatgagatgcacagctggaatcctagcacttgggaagagtctcagaggtttaaggtcatcctcgggacatagtgagttcaagagaagcctggatcacattcgtgcctctgtcactcatggtccccacctgccttaacaacctttgctctgaatagggcagatcttgggcctggcgagacaacctttgggggcggggcacttcttttcagagatgcatgatcagacatgatcagaatcaggtggagcctctagaagcttgcctgcctctcacaagccacacataatcatacaggagagttttgtgcttcctaaatgggggaagggtgggaaggaagccatactaatatgtccctacttggccatttttccccaaaagtgaccacttggagcagtttcatgtgccagggagcccagaatagtgtgttaaaagtagaggtgggggctgggctgtcttcattcattattctctttcctgttgctcagtagctgtgcaacttgagacaagtcagttctcttctctgtgcctccatttcctccctggaaatctctacagtggttggtcgtcctcttcttccagactagcttgcagcattaggatctgcctcatctttctgcccttctacacattctcgacctaactggggatcctcttcctcctcctcttcttcctcttcctcttcttccttctgctcctcctcctcttcttcctcttcctcttcttccttctgctcctcttcctcctcctcttcttcctcttcctcctcctcctcttcttcctcttcctccacctcttcttccttctgctcctcctcctcttcttcctcttcctcctcctccttttcttcctcttcctccacctcttcttccttctgctcctcctcctccttttcttccttctgctcctcctcctcctcttcttcctcttcctcctcctcctcttcttcctcttcctcctcctccttttcttcctcttcctccgcctcctcctcttcttcctcttcctcctcctccttttcttcctcttcctcctccttttcttcctcttcctccacctcttcttccttctgctcctcctcctcctcttcttcctcttcctcctcctcctccttctcctcctcttccttcttttcctcctctccctcctcctgcccctcctcttcctgttcctccttctcttcttccttctgctcctcttccttctcctcctcttcctcctgttcctctttttcctcattctctttctcatctccttctttcttcctcatggtctatctttgatatcttctttcctggatccaagactttgcactgacatttctctgttctcctatcctgacttccactcatccccttaggaaaagttctacctggctggttcatactcagatgtaaataactggttagggccggtgaaaccagaggatacagggaccctttcttctagttgctgaatgcctgcagggtgcattccccacattctctctcctgggaatctaggttttactatgtagccttaattgccctggaattcactatgtagaccaggctggccttcaattttcagagatctgcctgcatctgcctccccagtggagggattaaagtgtggcgccacacccagccctggaagcactttcattggtttactttacagggatcaagaaagctaggcaccctcatccccgtgtcactcagccagtgaaggtagtctgctggcctggcgagctcactgggttgtgaccaagctggacctggacagacagcagctggaagtaccagatgggtcctggtatgcagatggggttggcagtgccactgggagaggcagagactttctagtgccactgagccttccccttaggagttggtgctgtaagaggtaggaggcaggagaaaattctgtcctggtacctgtacacagttgcgttgccgtgggtcccatgctgctgggctttcgcagtgggtcctttccagtcttggggggaaaggaagagagagacatagactttggacattccctgtctcttggctcatcctgactggaaggcactgaggttgatcagcatacagggtctctccttcccagtcctcagtagctagcctttgacccttccccattctcccaagcccagtaagggaggttagagatttgccatcaggaatatggggtgcatagctctgcccaggaggtgctggggagcgggaaagtattttctgcctgcctcctctctcagtggtcactgacattcagaggtcagctagactttcactgtttacattatctgccaggatgctcccaggggaggggatgaattcccatgcccattttacagacagagagctgaggctagtgcagccagagcggggcctagtgggccctagcgggctctagtgggtccttgaggtagccaggccaactctttgtcaggggaacaagggactccttctccctagccctccctgagccggctggcacggccaggcgccttggcccccactggccatctgaagttggattgtccatggaggagaggcttcgggctgtctgagtagatgtgtggggccgcatctggtcagagccaggggtctgtttgccagtgtgattgatagggtgtggtgtggagacagggacatcactctgtaggagctagagaaggggtcgtgggaggtggtggaggctgcagctggtagctgctacaggatgggggaagggtaggttgtcattgcctgggttgttgggggcttccctgtagagcatgggctgctcaggccccttcactgggcagagcatgagagaagatgcagtgctggcctctgcatgcagcaggacacacaggacagtgggtagtctcactctattacagagctgcttagatagtggctggagtcttgattgcagatatgggacctaggctccactcctggttctggatcaaccagtttcccaactgggaacaactctgccccccaggcttccccttcccagcatggggtagaccagatgtcccagcccccaggcctcccttccccagcatggggtagaccagatacctggggtggggtcctagctttgtcctgcactgtgcctctgatttcccttctttatgaaagactgtggtttgtaattaagcaagggcctccaaacagggctgatggaggccttggatgccgggtttgaagacgctagctagattgtaccagtctcatgtactcagactgccaggcactgcacaaagctgccagtttttactaaatgcagaggaagataaactgaggctccaggattatagcttgaccaaggtcacataacaaagaatcagcgagcgctctgctccaccagccctttggggaagccgttgctcaatcatgaagtcatgccttgccaaatccctctagtccctaactgtactgtcatggtctcagatacggccagaccagtgcctatcagtcttgggctgtccctgagaagtcactgggttctgctctttcctttgtggcctagagaggggaagggacttggttactgtcactcattgagctagagacagagcgagcatgccgagttgcctgccccccttcagccttggttggggcctcagccacaccttcccacagtgggtcaagctctgagctccgagcagtgaggagccctgaggtggtgattctctgcctgtgggtcttcctttctctcgccgactttgggcgccaggagccagggacggggtacatctccagtgcctggttcatggataatatccattctcatttgcttcatgcaatggcttctttctgtctcccatgacccaacggctagaggccgaaggtctagcagtaaacaaacagatgaaatgtgtcccctcaggggacttgcattcctagtaagggacagacatggaataacaataacaaacgtaataagaagcaaaaaaaaaaaatatgttctgtcctagatggtggcatctgatatagagaagcaaggtggtggtggtatgccattttagcacagtggtcctgaaatggcactctgaggtgacattagagtctctcggaggaggtgaagaagtgagccttgatggtatctgtgtaaagaacattccaggtggaggcaacagcaagtgcaaaggtgggggggggggacggtggggggcggagaaagcatgcctggagtgtttgaaggatagtttaaggctgggggtgtggctggagcagggagaacaagggagagaagcatgtgttgggggcgggaagtctatgggggaccatgagggtgcagcagattacagaggaccatttaggctgggtttaaggatttaggcttttgttccgatgaactgggagctatggagagttgggagcagacagcagggcaggaactaacaggatgatggagctactgtgagcagatggtgggggaggagcacggaggagcatctggaggctcctcaggccctgaggaggcgtggtgcaggctggcctggggaggggcgggagagggggccggagctgaggccaggtatgaaatactcaggatgtggatgtgacagcgaggggtcaggtggactcctgcagtcactgaaggacagtgttcacctctggtctagaactcagggaacttgggttcatggctcagctcgctcagtggtcttgggcaaatcccttctgcccggactcagtttctccttgtgcacaatgggagcaaccatacttatgccagcctgtgcttaaagactacgaagatgatgaatacttcatgggcctgtctcccctcgactacagggagcccgaaccaacagctgccatggcgtcacgcatcgggctgcgcatgcagctcatgcgggagcaggcccagcaggaggagcagcgagagcgcatgcagcagcaggctgtcatgcattatatgcaacagcagcagcagcagcagcagcagctgggtgggccccccaccccagccatcaacacccctgtccacttccagtcgcccccgcctgtgcccggggaggtgctgaaggtaaggcccctgcctctcccatccctgctccctgtagaggagtccctgccccctccacagctgtgccttccccctccccaggtgcagtcctacctggagaaccccacctcctaccacctgcaacagtcccagcatcagaaggttcgggagtatctgtctgagacctatgggaacaagtttgctgcccacgtgagcccagcccaaggttccccgaagcctgccccagcagcatccccaggggtgcgggctggacacgtactgtccacctcggccggcaacagtgctcccaacagtcccatggccatgctacatatcagctccaaccccgagaaagaggtgagcggggtggggggggtgggggtaggggttccggcttggtgtcagttgtttggaaatagtctggccctcatggcagacctgggggtgtttctttatgggcctctagcctgagggagacacagccgccctagtctgaagagagttgctatcttcttgcaactctgctggggacagggcagactcacagaagtgctttcccagcccgggaaggtgtgtcaagaactccctgtcaagggattcctggggacaagcctcaggctcggctgtaggacgctcctcttgtcatttcctcctcctccagatgagcaggttgggtgaggtggcaggggggcagctgcccctctctaggtgggccgaccccagatggaaacgacatggacgtttctctcttctagtttgatgatgtcattgacaacattatgcgcctggacagcgtgctgggctacatcaaccctgagatgcagatgcctaacacggtacttttcgggctggacgggagggggacggcacacacagtggctccctggctggggtgagctctcagggcagagctggtgtctctgtggaggcaacagtcatctccattgaatactgtgacagggattcagggtgcaagtagaactgagtcaaggcatactggggatgcttgggagacagagctgggcagaggcaggcgcatttctgtgaccacaggacccttccacaggaagtctcgtctgcctgattattctctgggtctcattggcttggttggggaggggaggcataggtaggtagcagatgagccaggtttggaatcaggaaacctgaggtttgtcatgaccttgggaagtcccgccacgattttgacctccccctcccccactcagttgtaaaaaggggggtgatactatctacccagagggtcataggaagattagaagggacaaaaagagggaggggttggagagatggctcagtggataacaggtaagattgctttcagaggacctcagtttggttcctcaaacccatgctcgccaagagagagccaggaggaggcaggcagttttcagccccttctgccctggtgacactgccagggggctgctcaggaatcagtggctcctatctatgcagtggctgtctaggccagtggccggctcttgcctgggctctgtggtaggtaggacccggcagaccttgctcctgcctgttgaattccatactctgggaaccttgcagagaaactccaaggctgattgagcccctccctaggacttgtacaaaaaagagccggatccctcgggttcctcctgtcctcgccctggccgggggctaccgagggcagggctgtgaggatctgctcttttctctgtggagggagccctgcacattgcatcctggggaaggggctcaggggtgactttcctgttgcccagagcagctgctctgggaccatgggtccaggtgaggactcaccaggcgcttctctgccccttccctcacagctgcccctgtctagcagccacctgaacgtgtacagcggtgacccccaggtcacagcctccatggtgggtgtcaccagcagctcctgccctgccgacctgactcagaagcgagagctaacaggtactctgccctgtacctttggggtttcctctcttccctttttcttctctcccttctttctcaccgcctctctgtttctctggcctccagatgctgagagcagagccctggccaaggagcggcagaagaaagacaatcacaacctaagtgagtggtgctgggccctccttcagctcacctaggctggggagccagcccctgcctcatccccaccccagccccttaccagcgtccctagcttgggacacccacagctccaaggctgtgaaccaacccccactccttccaggctttttaggaaagtgggaggggcttctggaagcagcattcatgaattttccaggctatccgattgcagtcttcagagcctggggcaccaggagtgaaggaggctgccccaggcagctctctccctagtagctcgactggtttcctgaccccgccccctgattagattgcacccagaccctcctcagctttcagagatctctcttttgttttgttttgttttgttttgttttgttttgttttgttttgttttgttttgagaaagggtctctaagtagcccaggttgccttggaactcagtttatagcccgggctgacctagaactcgcagagacctgcctcccaagcactggaattaaaagcttggccaccacaccggtccttgggtgcctcgtattttaaacggattttctatggggtgtccagcttaggtgggggtcccacctttctaaccgtgccttccggaatcttgcttaaactgtagttgagagaagacgcaggttcaacatcaatgaccggatcaaggagctgggaatgctgatccccaaggccaacgacctgtgagcagacttccctggggagcgaggggggcgagagaggccagggtccgggctgggcagcagctgtaggcaccaccagctctcagttgctaagggcagcagctgtaggcactaccagctctcagttgctaagggcagcagctgtaggcaccaccagctctcagttgctaagggcagcggctgtaggcactaccagctctcagttgctaagggcagcggctgtaggcaccaccacctctcagttgctaagggcagcagctgtaggcactaccacctctcagttgttaagggcagcagctgtaggcactaccagctaataagggtggtgatggaggcagcatgtttgagaaggttcctgctcctactgcgtcaagacagcttctgttagaaaggaggttttggggtgggtggggggcttcctggagaaggggccttactgggaaagtgtatgaagggctatggactgatggagaggagagagatgctggccaggagagctgaagacaggaagatgggcatggggtggacagattgcttgagcccaaggattagtgaggagctgaacatttgcacaaggctagctatgggcaagggtggggaacactggaactctgagctaagcctgcggtgagagggccctggccaggcctctgactgcccctggttgtggccacagggacgtgcgctggaacaaaggcaccatcctcaaggcctctgtggattacatccggaggatgcagaaggacctgcagaagtcccgggagctggagaaccactcccggcgcctggagatgactaacaagcagctctggctccgcatccaggtctgacccggactttggactcctcgggtagctctcactgatctgatccggctcccaggccccggggcaggggataaacatctggagacctggaaatgccacccatagggaagaaagctgtcttggtcatgataggatgcctcaatgaaaaatgaaccccagttccgtcaagcagcatatagctgcaggttcacttctgtgagaccctcccttattttgcaatccacactggaggtcagacagatctaacacatgagcttgtgtgctcacacacacacacacacacacacacacacacacacacacacacacacacaaacacacaaacagacactgtctctgtttctctctgtctctctctcattcaaagacagggtttctttgtgtagccctggctgtcctagaactagctctgtagacctggcctcaaaatcacagagattcccctccatacccagctaggtctaactctcttaaaaccatgtaacattgccgggtggtggtggcgcacgcctttaatcccagcactcgggaggcagaggcaggcggatttctgagttcgaggccaacctggtctacagagtgagttccaggacagccagggctacacagagaaaccctgtctctgaaannnnnnnnnnnnnnnnnnnnagaaaccctgtctctgaaactatgtaacataagtgttgtcccacttaaaaaaaaattttttttttgagagacaggaggtttctttgttgagcagactggcctggaaattatggctctcttacatttgccccccacccagtgctatgattacaggtccatgcctgactctgcaggtcgatgttatggggctacagtcacatatccttgggcaatgctacacactgggcctaaccttaaggaagcaggactaactaccctgccctgggtgtctgggaggcagcactgggaatctccagcagctgggctgacttaagaagtaaggcctgagggccaggaccctgccagaagtgcaacgcctattcctggtggaccataagttttgtttttgttttttggttttttcaagacagggtttctctgtatagcactggctctgtagaccagggaggccttgaactcagaaacctgcctgcctctgcttcccaagtgctgtgattaaaggcgtgcgccaccgccaccaccacccggcggcccacaggttttaaaattggattgttcatgatgggtgatagaagtcactttttttccacctacaaaaacttagcattggcgaataagaactcacccttagttaaggaaatgcgttttgatggtttccattcccaccaccaccaccacccagctcagtttaaaatcctgagagggacctagccaaggtgtaccatggtggcttcacgaaccgctggccagctgtaacttgcagcctggagagcttggtctaagctcacactgccctctgctctctgttcctccagctgagatagtcacaggagatgggggcaagtggtgcagtgggtcacagggagggagggctagcctgggctgctgtcatgtgtatctcatccttctgtccattccaaacaggagctggagatgcaggcacgcgtgcacggcctccccaccacctcgccgtcgggtgtgaatatggccgagctggcccagcaggtggtgaagcaagagttgcccagtgaggatggcccaggggaggcgctgatgctggggcctgaggtccctgagcctgagcaaatgccggctcttcctccccaggctccgctgccctcggccgcccagccacagtctccgttccatcacctggacttcagccatggcctgagctttgggggtgggggcgacgaggggcccacaggttaccccgataccctggggacagagcacggctccccattccccaacctgtccaagaaggatctggacttaatgctcctagatgactccctgctccccctggcctctgaccccctcttttctaccatgtctcctgaggcctccaaggccagcagccgccggagcagcttcagcatggaggagggtgatgttctgtgacgctggctgcccctgtgccaaggagcaggggatgcctggaggctgggaggaccgagcagagccctcccatccttcaggctgcacttggtgtgaagtagccgcctaccctgcctctctccttccccttggctgctacccccaccctgtttggacttagtgcctgcctggcagctgatggggctggaggagccctccccctcggcttcgggccccctcctctggcggcagtactatgactatgatggggaagaacaggggtgaggcagaagagaaataagaagaaatcctgctaggggagcccctctcctgagcctgggctctcctgtggaggacattttggagaaggaggtacaagtacctctgaggcagcagctggtctgggggtgcccgggcctgccttcctgggactagatggcacccagcctgtcgccctcagcctgaactcccccacaagtggggcatccacccccatttggtgctaacagctctcccctggtggtatgagggtggggtggccagaagaggagtctgggttcagggtggcgagcacccccacccccagacctcccactttgtgcctttagtaaacactgtgctttgtagtatgttgtcctggctctgcggtgcgtcctcagcccatgactatgaggggcggggcgggggccgagcggggagggcagcccagtggactccttcttggattaagaattcaattgctccatgaaggatctgaaggaggttctcttggattcagaggccaaagaaacaaccttgacagcgtggggctgagagcattgtctcactgaggccacatggtggcgctgcagccatgctggtctggacccacacctccagctgtggtctgaacagcagtggaggtgggtgtgtggctggccggcgttctagcatggccctcaacattcttcccggtgttggtagctacagaccagctggagaccaggctgtatccttatggcgataggaaatggacccatttggaacagatgagagcacaggaccctggctgggagtcaaagcttagggttcactccccttcctggctgggtctatgccctagtgaggttcaggacccgctttgctccaggttcctggatggggaagtaacctgggcagggtctctagaggttcttagttcctcggtttccaagactctttagccagggaccaaaatggtttcccctcaaagggccctaaaaggccaaaggagcctaattaaaaagaatttaaatttttttctcctctttgaagaacaagagatcaaatcaataattggagcaatgaatgttcagagaaagaaaggcggtcaaacggcgtggtcaagacggcactaggctgcctgagctgaagggttactatcaaggtcagatggaggtgtggttgaccttgtagagcctgagttagcctggccatatctccttccagttcctggtctccattgcctgggatttaccctcatgagacccacggggtaaaccccaaactctgtctgaggtcaactagagactgggatttggggctcatggggtttgggccagcacctcaggtgttgttggatctgatatttccgtcaccctggggacgtggggacgtgggaagctgccttctacttcctcacataacccgtcaaacacaccccgagttacccctgtcaccaaggcctggagcttccttcctttgatttgttcacagcctgctgcctgggcactgggtcaggactagggtgtgagtggggttctgtccacacgagggcgcacaggcccaggcaacagcggtctgaggagccagcctgaagactgagtactccacacagcctgggtgacttccatcctgcctggggctgctgatgtccaccctctggggtgaaatccaagccaggtgctgcttccggcagttcaagccaccaagaaatgtgtatctgagactggctggccagaccctgacctgcagtagcaagggagtcaggctgggggttatgactgccagttaaataaggggactatgttcttcacccttagatgatgagtgagcttggcaggacgtctgcagggtaaaatctcattcagactgacaatgtgtgctgtaaagcagagatggtccctccaaccgtttccttccaatgagggagccccctttaggccttggggacaaactctggtgggatgagatcctagcagccatagctttcttgggtcccatgtgggaggacctgaggtaggagctgagcaggcagagctgggtcatatacatgactgcccatcccccgggcgccaagttcctatgtctgtctgtctgtctgtctgcccacaccagctgctcccacttccctggttgtcagttctggatttctacagggacaactgggtaagggacactgtgacctcaggatgacctgcttgacatctcagctcccaccattttttttttccaaattggattcttcatttgctattttgtagcttttaacaagctgaaggtgtgagacgctggtgtacacacagacagacacaattctagtcctagcttcaggaacacctgtcccttgccctctctcaaggtctgtctcctcccctgccctctgagccctctggccagctggaaagagctcttttaacgcctttctggcttcccaggcctccagacccatagtccggcccctgtctcccctgctctcctctgaactcatctcttctttgctgccttttctgagggggacagtggaattatacaatatttaagcagccagagccaggtcctggaagatattattaatgtaaaagggatggaccgcaaatgcttttggacctggttacaattagagggtgatttttctaaaggtcaatgaattcagatgatatccacaggggggagagaaatttaatacctttttagtgaattaattaattataatattatatcggcttggggttcttttccagagtgattaaggcggtgatctgtcttctgcgagctggctgctgtgaggaccctgtcacgggcttggtgactgaggcccttcattctcctctcagccagccaggtagggggctgggaggacgcagacagctcagaagggcttctcaggtgtggtgattggctctgtcctgctcctcagcctatgtacgcagtcggctccctgctcttggtatcaagcctcataccatgtgacttagaggactctcctttacacttagggaaactgaggcccatggattttttttttttttttttcgagacagggtttctctgtgtagccctggctgtcctggaactcactttgtagaccaggctggcctcgaactcagaaatcctcctgcctctgcctcccaagtgctgggattaaaggcatgtgccaccaccgcccggctggagtatcagatcttaactgagcatgctagccaaggacagccctgcagggccatcctataaaccaagtagtctggaaaaccaacccccaatcggggaagtgccagtgtggcatttgatcttcctgtcaggaaactattatggggtgtggagtgtgctcatggggctgcagggcattgctgtcccagggagaccagagcatggccacgtttgtccctgtctttagtcaaacagccttctaacaaaccttcataggacatcactttattccttgggagacaggctgacagtcattctggagccccagctcggcttcttagagaagtggagagtgggagcctgaggctagagaggcatcaccagggaagtgctgagcagtccctgagtgctgaccctagtgtgtgtgatggtgagctgactggagtgctccccctggaggaggaagaagggaacgctccaggtatgggacacttgtagtgcagagaggtctaaaagtgcaggggccaagtgagggcctggcctcatgtggcacttagtccatgaggcaggggcacggctgcctttgcctacccaagttccagatgtgttgaccgagactgctccacaaggccacagcatctgggtggaaagccagaaacaacaaagccaatgagaccagcacttaatggtgggctctgctgcgtgagagtctctttgtgcctcagtgtccccatctgttgacgagattgcaatatataactaattcaggctgctgtatgaattaaaatgggagtaaggggaactaaactttgctgacacccttaggggggatcactgccccccattctcttttagtgggggcaccaacggaagctctacattaggcgagttctttgttgggggagatccacttttcccatgactcagatctctcttctgcctgcctctgtccctctccctcggtgccctctgtggcctggctcccccgcagcccctccccctctggctcacatggcttgcggcaggccagggagggccttcccattgtactatctttgggccctaaattaaaattgatgacatcttgaagtgagcactgaaggtaattttgcttcagagccggggatgctaatgaggccccttaatggtgcaagtgctgggctgacgggtcgtgtgtcacacgcagcagctaggggggtaatggccgcggtaagtgctggtaattacaccctgtcttgctgtattttggcaggcctggtgggagagcagaggctcgatcaccactggtggggacgcccccacccaccacgggactgacagccagggatacttcctgggcccagccaggccccctcagctccagcaccacctagacttggtggacatcctctgacacacacatgctgcccaacccacagtcatatcatcggacaccgcttagccttgacatttgtccccagagcctgggcacgttcccagggcaccctgcatgtggagtcatgcacacgtcttgcctgctacactccctctaagcacaaaaagatccatgtataggcaattgcaaacccacacaaaattgccctctcagtgtgaataccctgagcacccactgtgcttgcatctaggagcgctcatcctcccaagcaactctccccacatcctctgtctgtctgtctgtctctctgacacagtctactttttaatttatttatgggtttgcttattttattttttatgtatactttttttgcctgagcgtccgtctgcactatacatgtcttgtgcccaaggaggtcagaagggggcagcagatcccctgggactggagtcacaggtggttgtgagcggccacataggtgctgggaattgaacctgcattctatggacgagcacccagagcctgtcactgacccatttctccagaccttcactgttacatttgcaatttttaattatgtgtctgtgtgtctgtgtccatatgtgagtgcaggtccagaagagggcgctagagtgccgggagctggagttataggtagttaggagcagccacatgtggtgtggggaactgaactcaaggttttctacaagaatagttcatactcttaacccatgctcagctcctagcatccacatggtggctgcacccatctgtaactccatttccaggggatcagatttcatcttctgaccttggggtgaggggtggggggaggaggcaccaggcacacaggcaatgcatatgcaggtgaaacacccatacacataaaataaataaatccttgttaaaaagcaagcaagaaaagaggacctaccaataaaacgggagagttcacaaagctcacaggctcttgtcctgtgggtatcctcctctcccacggtctaccagtcacgtgatcacagtaagggttaaaagtgcggactccttttgaccgcctgggatcgggatcgctgtctaggtctatcatgtgcagtcactccgcctctgcctcgattttcttgtctgtaagatggggatgataagggcctggcacaaccctgataagtgtgtagggaggcttgtgtcctggcagagggtgccctccaggatgtgaagggagtagaaggtagagccggggcaccctcctaaggctgggtgatcagggagggcttcaagggggaagcaggcttgggattgtaaccagcttgtctgtgaaccagcaccctcctatgctgctcagccgtgtcctggtcccgggtgggtagtcacatctgagcaatggggacagcttagagtgtctgggagaggccagatgtagggccacccattccatatgcagggccaatggtattcctgctgtacctgctatggtcctatcggtgcacccaggaatctaaacgggcctagggaggccacatatctgctggctgtgtctcacaggaggaggtgatatcctggtgaaatgtctcagagaatactcagaggtcatcggtgaaggaagtcaggataggaacgcaagcagggcaggctcctggagctgacgcaggggccatgcaggagagctgcttactggcctgttcctcacacactgctcagctaacttttctctcttcctttgtcctccctccccccccacctctctctctctctctctctctctctctctctctcactgtgttgtcctggttggctggcttggaactcactatgtagaccaggctggccttgaacacagagagccagctgccttttcctccgaagtgtgccagcatgcccagctgaaattttgtactacccaggaccacctgtccagaggtggcatggtacactgtgggctgcccccccccatcattcatccatcaggaaaatgccccacagacttgcccacaggccaagctacagacacattttctcaagtgaggcttcatcttcccagatgaccctagcttgtgtcgagttgacttaaaaactaaccagcataggcgaatacagatcgttttctttctcttttgtttttatattttccttacttcctgttgttgttgttttgagacaaggtctctatgtagcctttgctgttccagaactcagtatgtagaccaggttagcctcaaactcatagcttcatctgcctctgcctaccgattgctaggattaaaggcaaagctaccacacaaaactatgagtaccagtctttaagttgctagttcaggaagagatcaaaagtcaaagttacaaatctgtttttttatttattttattttatttatttatttatttatttatttattttactgcatatgattctttttgagtcaccttgaagttaaaaacacacatgcaaacaacagaaacctacggatgggaccagaggaggtggcactcatctggaatcctagctcttgggggataaaggcaaagagagcagaaatacaagtccattcttggctattagcctaataaacatgaaattttgtctcttaaaaaaaaatgttgggcatggtggcatatgcctttaattccagcacctgggtggcaagggaaggtggatctcggtgagttcgaggccaccttggtctaccaagaaagagttctaggatagccagggtcacacagagcaactctatctcaaaaagcaaaacaaaacaaaacaaaaaagtcaaaagaggggctgggatgtggctctgttgcatacatgagtcctgaagtcctaggttcgatctctagcaccaaacaaacagggaatgggggaccacatctgtgattctagtatttgggaagtataggtaggagtatcaggagttcaaggttatccctggctacctgaggccttgaggtcagctcaggctacaggagaatctgtgatcacctgggaggcatatgtgtttgcattggtaaagggcactggatccagactccaacagtgagaccgaccacttccagatatcctctggggtggggcgagactggggtgggctactgctttcagtgggcagagggcctgggaaaggggagggggggagggctgctttctaatgaaaaattagtgtctgctgtgcttctaatcatgtggttccatgtaattaagaagctaattagtgccgtgtcaattcaggtttaattagtcccctcttcagagaagtcaggaagaccctcatgctaagagcttctggaataaaaatgtgggcgtggcatggtaggtgaaagggaagacgtcaggtatggggtggggggagcctcacttcctcctaggatcagtgacttgggtctcctttataccgtccctcagtgaccttggccatggagacactggagccatctgaggctctctccgccctccagcatctgtgaggacactctactaagtgtccttatgttaccgttcccctttccggattcaccctggaacccatagttcacaccccattctttaaacttgctttgtgataagcattgggtactttcccaaaaatggtgggggaataggtacccagaaagcttaaggaatccactcaaggtcacacgtccagttccgtgggggcacccagcctgccagaccccaagccctgtgtgaccgaggaagcaaagcttgaccctcacagtaggagccagctgcaccctccagcgctcacatcttgctgtttctctgtgcactggctgggtttgtgtgtcaacttgacacaggctggagttatcacagagcctcccttgaggaaatgcctccatgagatccagctgtaaggcattttctcaattagtgatcaatcaggaagggcccattgtgggtggtgccatctctgggctggtagtcttaggttctataagaaagcaagctgagcaagccaggggaagcaagccagtaaggaacatccctccacggcctctgcatcagcttctgcttcctgacctgcttgagttccagtcatgacttcctttggtgatgaacagcaacgtggaaagtgtaagcccaataaaccctttcctccccaacttacttcttggtcatgatgtttgtgcaggaatagaaaccttgactaagacactctgtgatgatggcggcttcctcttcaggcctctcagatgaacatctccgcagtcagaaaagcctctggaccccgctggagaacagctcatactctttgttgtatctctaatggagctgggttaccaccatggcctgtctcccacctgagatgaaaactctgtattggggggggggtgcttcctgttctgttctgagctcctggcacctaggatttgttctgaatctgtctatagaatgaatggacagacatgtccacgggcatcaagagccctggcacaatgcactctcgacagctgagcctgatctgactccttcaccagccattgtttcttccccaaccccttcttttggtgacagtctcacgcagcccagtctggccttaagcttagtatgtagcagaggatgtccttgaactcctgatcctcctgcttctgtgtcccatgtgcagattgcatatatgtgtatgaatatatgtatgcatatataggcatatatgcatacacacacacatatatatatgtatatatatatattttttttttaaactgggcacctggaattcagtgtgcaaaaataaaagataaaattcatttctggttctgttttgagagaggatctcctatattctaggctgacctccaaagtggctcggaaggcaaagatgacctcaaatttctctctctctctctctctctctctcctctctctcgtgggtgtgggtgtgggtgtgtatttccatctggggtgtgtggtcatgtgtgcatgccaatgtgtggattgcctgtgtgcacgtgtggagacctgaagctgatggcgcgtgtctttttgtgtctttttttttttttattgttcttcactttcttgacatagtctctcagtggaagccagagtcagacacttgctagacagactagccggcttgacctgggcatcccgctccctgctgcacctgcccagctcctgtgtatacccatgggttccaaagcctggtcctgaggcttgtgacccagtgagtcattttgcgctgggcaagcatttctccaactgtactgtatccccacccctcttcttgtcttttcccgctggccccagatttaaccatccttctgttgtggcttcttaacagcgaccctcgccaccccttcccctgctactcagcccagacctggtggttgggtacagagcagtcccgatggccatccttcttggtgtcagg

SEQ ID NO: 223 - DNA, 1755 bp, Mus musculus
ctgaaggacagtgttcacctctggtctagaactcagggaacttgggttcatggctcagctcgctcagtggtcttgggcaaatcccttctgcccggactcagtttctccttgtgcacaatgggagcaaccatacttatgccagcctgtgcttaaagactacgaagatgatgaatacttcatgggcctgtctcccctcgactacagggagcccgaaccaacagctgccatggcgtcacgcatcgggctgcgcatgcagctcatgcgggagcaggcccagcaggaggagcagcgagagcgcatgcagcagcaggctgtcatgcattatatgcaacagcagcagcagcagcagcagcagctgggtgggccccccaccccagccatcaacacccctgtccacttccagtcgcccccgcctgtgcccggggaggtgctgaaggtgcagtcctacctggagaaccccacctcctaccacctgcaacagtcccagcatcagaaggttcgggagtatctgtctgagacctatgggaacaagtttgctgcccacgtgagcccagcccaaggttccccgaagcctgccccagcagcatccccaggggtgcgggctggacacgtactgtccacctcggccggcaacagtgctcccaacagtcccatggccatgctacatatcagctccaaccccgagaaagagtttgatgatgtcattgacaacattatgcgcctggacagcgtgctgggctacatcaaccctgagatgcagatgcctaacacgctgcccctgtctagcagccacctgaacgtgtacagcggtgacccccaggtcacagcctccatggtgggtgtcaccagcagctcctgccctgccgacctgactcagaagcgagagctaacagatgctgagagcagagccctggccaaggagcggcagaagaaagacaatcacaacctaattgagagaagacgcaggttcaacatcaatgaccggatcaaggagctgggaatgctgatccccaaggccaacgacctggacgtgcgctggaacaaaggcaccatcctcaaggcctctgtggattacatccggaggatgcagaaggacctgcagaagtcccgggagctggagaaccactcccggcgcctggagatgactaacaagcagctctggctccgcatccaggagctggagatgcaggcacgcgtgcacggcctccccaccacctcgccgtcgggtgtgaatatggccgagctggcccagcaggtggtgaagcaagagttgcccagtgaggatggcccaggggaggcgctgatgctggggcctgaggtccctgagcctgagcaaatgccggctcttcctccccaggctccgctgccctcggccgcccagccacagtctccgttccatcacctggacttcagccatggcctgagctttgggggtgggggcgacgaggggcccacaggttaccccgataccctggggacagagcacggctccccattccccaacctgtccaagaaggatctggacttaatgctcctagatgactccctgctccccctggcctctgaccccctcttttctaccatgtctcctgaggcctccaaggccagcagccgccggagcagcttcagcatggaggagggtgatgttctgtgacgctggctgcccctgtgccaaggagcaggggatgcctggaggctgggaggaccgagcagagccctcccatccttcaggctgcacttggtgtgaagtagccg

SEQ ID NO: 224 - protein, 543 aa, Mus musculus
RTVFTSGLELRELGFMAQLAQWSWANPFCPDSVSPCAQWEQPYLCQPVLKDYEDDEYFMGLSPLDYREPEPTAAMASRIGLRMQLMREQAQQEEQRERMQQQAVMHYMQQQQQQQQQLGGPPTPAINTPVHFQSPPPVPGEVLKVQSYLENPTSYHLQQSQHQKVREYLSETYGNKFAAHVSPAQGSPKPAPADGVRAGHVLSTSAGNSAPNSPMAMLHSNPEKEFDDVIDNIMRLDSVLGYINPEMQMPNTLPLSSSHLNVYSGDPQVTASMVGVTSSSCPADLTQKRELTDAESRAKERQKKDNHNLIERRRRFNINDRIKELGMLIPKANDLDVRWNKGTILKASVDYIRRMQKDLQKSRELENHSRRLEMTNKQLWLRIQELEMQARVHGLPTTSPSGVNMAELAQQVVKQELPSEDGPGEALMLGPEVPEPEQMPALPPQAPLPSAAQPQSPFHHLDFSHGLSFGGGGDEGPTGYPDTLGTEHGSPFPNLSKKDLDLMLLDDSLLPLASDPLFSTMSPEASKASSRRSSFSMEEGDVL

SEQ ID NO: 225 - DNA, 59575 bp, Homo sapiens
taaatgaagggcagagctgtttgggtgactccatgctctgcttctccccgagggaagccaatggtgcttaccatttacaaggcttgttacagctgcagggttattttgtcctcaactcagctctgggagacggagccaaatggggacccaggtatcttggttccgggtgccctggaaggagttcaggggatagggcaggggacaccctaggtgggcactgaatctagggagagccaactgggcttttacgggctaatggcctggtgactcacagtcagaggtgggcagggagtgggccagggcaggcaggagcccttccagggtcccacgtgcgctgtcacaggcctcctcagcctgtttctggaaagctgagaagtaggtggaaggggactcccacccctcaagtctggctgccctttgagggtctagctcttggccctgagccctcctggggctctgtttatgactgtaattgcatcattagccagagttaatagagttacttagcacctgcccccacagggagtagcccagccaccccctgggttctgtctcttccttttcaaagtcaactcggtttctgcaggcaacaggggtttccccaaccacagctgtcatgaaaaccaggttgggcctttgtcctggggatggagggcagtcagcacttggggcctggcttggggctgccctggagatgaccatggaaattgggttggcctcctctgatcggagggtgggagttcagggttcccagagctgccagaaatgttcacgtcccaggacgcagtgaacatatatgcatgtacagtgtggatcctcatctgagaggagggagatgaaaacacacccacctcacaggctgttgtgaggactaagggtgcggcagtgcctggtacatggtgagtacatgatgttgctttctgggttggtgtggggtttatgtaatggttgtgagtttgtgtgtgtggttaaagtgtctaggaatgtgggtagagatgaactgtgcatgtgtgtctatgagagtgtaacaataaaacaagattatattaatagaatattcatctcttcttttatgctatactagaacaatattataataagattgattatacaatagttgccaacatttattgtgtgtttagagtgaggtgggaattactgtttgcattacacttacttactcagagaggttaagcaagtcacttaaaatcacacagcctggaagtgacaggattggaattttaacctaggtccaattgactccaaagtctgtgttctcagtccctaaagaagaccacttcttcaaggggtttcccaggagttctctcttaaaaggtgggggtgtggtggtctggggaccttcttttctctatccagggtttcctgctctaagcagatctttgggaggcctaggtgggaggatcgctggagctcaggagttcgagaccagcctgggcaacatagcgagacctggactcaattgaaaaaagaatttgtatgaaaaaaataaaaataaaaaagcagggtgggaacttgctgaggcccctgtctgagcaccatacctgtttcctggcctttcttctgagctgccagcatgggtgaccaaaggacctccggctggaacctgtcttgactggccagggaaggagactggttcaggcaagacttcctgggcttctttggaagccccagacacccaggaagggaggaggcatccttactgatggccttctaggtgcccggctttgtgccatgcattccacgtccattaacgtacagtgcagccctcagcaggcccttgtttaatcagatgtgcagaagaggctgtggggatcattgggtgagaatgggacggcagtaaagtcataagagcactggaccaggagtcgagagaccccactgtgcctctcactggctgtgtggctgggcaggtctctgctttgttcagcctcagtttccatatctgtgaatctggatcatctgtgggattccctccaaagcgaaccttctacaaatctttgccaaaggcaccggggaggaagaaaaaggaagagaaagcaaggggtggtgggggtgggttgttaggggtgtttgggagatgctgcagtccgcagaattgagctttagctaaagactggtcctggtgaagcaaccaggaagtttttcttgggacagccatagccactatatattgagcactggaccagtgtcacctggtcagggggttgttgagaacgtgggctctggggccaggctatgtggcttgcacagctctgccacttaacactgtgtgagcctcggcaagctgcttaaccccactgtgcctcagtttccacacctaaaaagtgagggttcttgcagcacccacctactagtgctgtcgtgagggctgagtatgccgatattgatgcacatgtagtacttagaatagcgcctaatgaactgttatgactcagtgagttatttatttctcattcttaagtgaggaaatagaggcatggagagctctagggaaggaataaagacctatgggttgcaaacaggcctctccatgtgtctaatgttctctgatgtaatgctttacgtggggcttcccaccactctctgtcccaccacaccagcctcctctccttgttgaataagacggtgcagggggcttggcaatgcctgaggcatctctaccacccctgccctgccacttgggtttccctgggtagcatctggcctggccactgaccatgcactcctagctgtggctgtcccctgctctcctatcatctgtccctcctccacactgcaccagagatacagatccccttggctgtgatgtcattggggacagagataaaatcgcagtgatagggtaggatctgggacttatcatgcccacaggaaatgctttgctgtgaaatggcaaagccgtgggtgagagccaagaggagcagaggcaacaggcagggtcatcaccagctttccttcctggctcttaagtgtgggcttaaggaggaaaaatgaggtctggccacccatcttttgtccagctttcttatggggagagccacctggccccataagatccagcacctgcttgccaggccatgcaggccacctggttggctcttatgcattcagcagtggtcccagagtaagatgcggtgctgtagggattaatccagggattccaccagactctccatccagaaacccatggctcatattccctcctcgtagcccttcctcactccttccctataagcaaatctttccctccatcagggcacacatttcagagagaccggggcactgttccatcttactgcagcctggctgggtattatgatcacctgcggaactcttagacaacaccattgcatctgaatctcttggggaggggcctaggcatctttatttaatttttttttttttctgggatgattccaatgccctttctctagggcagtggttctcaaatttgggcatgcatgagaactccctggaggaattgtttaaacacagatgctgggcccctcccggtgtttctgcaaattccatgtggtctagaatttgaatttctgacaagtcctctagtgatgctaatgctgctggtccccagagcacacctggaaaaccactgccttcgggtcctgccgctttgcagctacccaggtgagagccgtccttctcctgggttctgtgtctctgactttgggcctggtaggcctgtccccttttgaaggcaggtcgccaggggcatggaccacttctgagaaaatttggtgtcccctctacagtcagtccttcccatttctccacctgtccccacctcccctgaaactatccactgttcggccttgcagctcttggtcccactctctgggacaagtgcttaaaactgtgcactggttgatgaaggcaggatgaggcggacaaacaaggatggcactagctgaggggcctcagaacatgcgtcagggtctgaagctgctgtgaaggtgcttggagctaaagtagcattattgcaataattggggaggtgttcagagaggaccctcactttgttgaagggaggctcttaaaatacttcctgttatttcactttcccaccctatggagggcaagtatttgattccagcttgaatcgtagttgttgttaacaataaaaatgatacagacacacacagaaataagctgttcccttttcctttcctctcccagaccagagatgtagggagggtagggggagggtccctgctggaggtagtggagtctctgtcatcttctaggtggtcctgggccttgagagagtggatggttgggagagcctgggggctggcccctgggggcaggggtgtggagttgtttgtggaaactggagggagttggggtgaagcctggtaggaggtgagaagaggtggcaggtcccacagccctgctgcaggggaggcgaggcggggccgggagtgggggcgagattggtgtctgagcccgccagtcctcaggtgactgggcacaggggtttgctgtgttttggtccgtgccgtacccctagcacctagaagagagcctcatatatagtggctgctcaataaatctttgtggaatggatgagagaatgggattgagcccccattgtgtgcccagaaatgcagacaccaaaaaaatgctctgtctaccgtctctaccctgcaggtgcttcaccagctgacacccaggggcctcgcccacaggtccacaaggcgctgagccctctgcctctgccctgtctccctccccgcacagtgatccaggcccagcctcctcctggtgtagggctcacagtctgttcctccccacagagagtctgccagcacctcccccaaccccccctccccgagttctaccagtgggtctgtggggtggggctccggtttgttttctcctgtttgccaagggaagtcacagcctgtcctttgccttgtttataattgctttgaggacagcacctgccgcggccccccacagtccctgaggggtgcagagtggccaggaggtgacacactatactgtccaccccctgccgcctcttgtcccctcccagctctagccaggtgcactttctgctgccttgccaggacggtgctggctggccttgctttggggctaattggaaccgtagagctgggggtgtcagagggcagctggcgctgcccccatgttgtcaagaggaggggatcgaggcccagggattcagcagcacaaggccttcagtgtcaacaggcatgtactgagcacatcagaggtacctggcactgggctggccaagcagggcgggtgggaacaagatcacagcttctcccgcaaggtgccgatgtcctagccagggaatcttagtaaccacagagggcagagaggagcagaatgcgagaagctagtgtagactaatgtactaaacaacataagcgcggtgatacctgccctttgccctgaagagcattctccttgggcctcttgctggcacagagaccttgactcagcgtggtttaggccctcagccctttccaccttctgggccccaggaagggctactctactgctccctgggccttctcacctgggggtcacctctgcaggctacgttctggacaagtccttccttccaggaggactagaggctgctggagcctttgaaaggaggctctgagccacccacctgccacttggaagctctggggccaaggggagatgtggtgctggatcagggccgacagctcaggcctccttggacctgcctgtgactgagcctccatgcttgggcctggaacctgggggcagtgcctctgttcctcccacctccagaaccttcttttttgtttgtttgcagacagggtctctctgtgttgcccaggctggagtgcagtggcacaatcatggctcactatagcctcaaccttctgggctcaagcaatcctcttaccttagcttcccaagtagctgggaccagaggcacgtgccactacacctggctaatttttaaaattttctgtagagatgggatctcaccatgttgcccaggctggtctcaaactcctgggctcaagtgatccagccgcctcggcctcccaaagtgttaagattacaggcgtgagccaccttgcctggccacaagccttttttctcccctccaccctccgccaccctctgagcctccatctagttccacagcatctgcagccttggactatctctctctctcctgctctttgtctccccttctctccttcctctttatttccttctctgccaccttccttcttttgatgtgttcaaaggatgaccagggcccaccccaccagtacctttctcacagtcagcctccaagtcctgctgtcaggggcccagaggaatggtccacggtagggtgaggtggctgcgaaggtgcccagcctgacgcaaccccctacccatggccaggaaggggtgtgtggtggctgggacatcctgggcggggtggcgggtgaaagaggctatggtagtcggctcctgtgggttgaggggcagccagcagcctgggccaactgggggaagggaccctccctagacagccccaagcattatcactactccagacctgtgcctaactataggttgtcatccacttctttggatctaattatagtgttttgcgaaactaggtatgggaagaaaatactgtatctatttacttatatctcattcttttctttcttttaaaattgtgaaatatagcatagttgcttaaaaagcataaacatacacatataatgtagtaaataattataaaagtgaacccctggctgggtgcggtggctcacgcctgtaatcccagcactttgtgaggctaaggcaggcagatcacgaggtcaggggtttgagaccagcctggccaacatggtgaaaccccatctctactaaaaatacaaaaattatccaggtgttgtggcacgcacctgtaattccagcttgggaggctaaggcaggagaatcgcttgaacctgggaggtggaggttgcagtgagccaagatcgtatcaatgcactccagcctgggtgacagagcaagactccatctaaagaaaaaaaaaagtgaacccctaggcaaccatcacccaggtgaataaacaacagaatgtagcttgtacgccaaaatcaactcatgtgccctccacccccagaggtaatcactatcctgactgtacgataatcagctccttgcctcttttattatgtaaccacctatgtctgcatcccttagctgagtttagttttgcctgactctgaatttaatacagatggaatggcgctggacatgttcttttacgtcaggcttttcccacccaacagtgtatttgtgagagtcacttatgttgtgtatagccgtagtctgttaattttctttcttttctttttattatttatttatttttgagatggagtctgctctgttgcccaggctggagtgcagtggcgcgatctcagctcactgcaacctccacctccccagctcaagcgattctcctacctcggcctcccaaagtgccaggattgcaggcgtgagccgccgggcctggcctttaatgtatatttcaacttcagtaaatattttattaagtggttgtactactttactccttgctagtggcccacagagttcctgttgctccttagccttatcaacacttggtcttgttagtttaatttctgccatgatggtgagtgtgtaacatgtctcatcctggtgtattgcattttcattctcattttaaaaatatataattttggggtatgtttgctgacatctataatatattcatgcatcggggtatatataagcaatttacaaggaaagaagcatatattgagagtgctcaaaagtttttactgataggaatatatgatcaaaacggttgaaagatcagggtaatattgaatgccaggaagggggttggcatgtagcttgggagttggaaggtgatattggtcttgtggggagaccccctaagtggcagtgcctgctggggctaagaagcctcttcccagagggtactgaaccacagagtacccatcacccttcaggccctcttgcctagcacatctggtgggggagagggggagactctcaggctagagccctcagcaggtgtaccgttcaatttggaattggcaggtgcccatcttttaggtgcttctagggcagtagttctccactaggggtgattttgtccccctaggggacatttgccaatgtctgatgatattggccagggataccactaaacatcttaaaatgcacaggacagcccctgtaactaattacctggccctgagtgtctggtgttgaggttgagaaactctgatctaggaaaagagccaggaaacagatttgccataaacttgctgcatggcctcgaggaagtcacttaagtgatttgagcctcagcctccttggaatctgaaaaatggatagcaagcgttgctgcccttccccttcatggggctcttgtcaggatgggggagatggtgaatgtgcaggcattttgggggaggcgtccctgcaaaggggccttgtggctgttgcgttccagtagagccaggccttttcagcactggcccttcttccttgactgtgttccctgtccaccaagctggaggcatcaggtgaccgctgtgaacctcagtcctggttcgtgctgctgcaggggctgtgaggcgcttcccccacagtccctgcgggccccagccttttgatgagggctgcagaaatgaggggttctctgggagccttggggcccaggacaaaaacatttccaactttgtccttagctggatgggagtccaaggttgtgggggtgataagaggtatttatcatgttccttatctgaggccccattgcaggtctcgggcggcaaggggcgggagccagaggtcctccctgggggctctgcacacccaggcctggctcctactcatcctttgtgtccttccagaatttgccagcccagggaggcccagggttggaccagagtctgggtccatcctccctgggcctctctggcctcactgttctgggcttccctcacattgctggcatctcctgccttctccaggagccacggcctgcctcatctcctctctgctgcccgcttccttcctgaaacctgcactcacgaaagggcccagtaaactcatccaccctgagacgcagacgaccgataatagcttaacctttcttaatacagggtatttgcttatcaacgatgggaatcccttggccaccagaaagaagcactaagtgaaatctctgcccagtctctttggcaggctgctaaaaaagtgctggggggctgaggaaccactgaacttgcatgtgtatcaagaacagtttctgcacaagtgaaaagtgtgcggtggtgtggatcttcccggagctgcccagggctctgcttgatctcaggctccatttcaaggtgggctgtagtacggcctcgacctgggtgtctggaggccctgggaaggcccaaggccaagactgcaggtgtatggccagtcaggaagatggtgagctgtggggcttctggctagaaggacacatgtctctaggaagcggggctggggttagggttaggcccaccctggacctggtgggattgggactctggcgaaattcttgctgctctgtgtctctccatctgcctagggccctctgaggtcaggctggggtcagggcggccatgagaggcctcctgtgggaggaccaaggagcgctgtgggcgcctggagccgggcgggtgagattgaagcagtctgtgttgggtaggctgcggtgtgggactgtgccgtcggggcgcagttccctctgtgctgtgagtaatcctcggccgcatttgcagctcccaggggattgtgcaacttcctctccagctgaggtgcagggggctgggtgagaaacagcagccgccggggaaatgaggaaactgagcccggccctggggctggggtgcggccctgggctccggcccctggaggagctgagcattccaggggcctccttccagggggctgccctctcgaaggtatgagagcacacgcgtgcatgtgtgtgagtgtgtgcatgtgtgtgagcatgtgtgtgaatgtgtgtccatgtgtgttagcctgtgtgcatctgtgtgagtgtatgtgcatgcgtgtggtgtctttggggaggtgggtgggtagggatgaggcccctcaggctgcactggcattgggatgtctttggggaggggtgggggtctctgagcatggccaaggctggggtgagggaaagaatggggaagaaggtggccaagctctggagtgcaggttggacagcgtgggaaatcaggagtcagccagagttgtgcttcagtttcctcatctctccaggcttatttcaagggtcgagtgagaaggtcatgggcaggatgggcttagcatgtcactggccaggccacagtgaatacccatttacattaggggctgggagcatatgctctacatccacctgcttgaatcctggccctgtcgttttgcagtttcatgatgctggcaagttatcctcctctgcttcctcatctgtaacatggagatgacagttatagtgcccaccttgtgagttctgaagagtaaaagactttactcacataaagtgctcagaatagagccagcctcccactaagtgcctgcacaggttaacacttcaccaggacatagcatgtttgtgtgcagatggcaaaaaactgcccagggctcctgacgatcatttttgatggtggaagtttgagctggaactgagattgatagtaagagctcatgtttacctggccttattccatgtcaggtactgtgcccagtgattcatctgtaccagccccttcaccctcagtcaccccatgagggggatgctgctatcattcccattttgcagatggggacatgtaggcccaggggctagagtgacttgctccagggcagctatatcagtgagggagaatggcagaatggtccactcagcccacaggtgggcccctcacccacacccctgccccttttctgggttccaatagaagtatgggagaggaggaggatggagggtctgctgggaggggtgtgagggctggccttgcagcctgtgggctctggccagggagccctttcttttctctgtgccatccccaattaagtaatcaaagtaacccacagctataaagagttaaattaatatagcgaatggagccaggtgcggtggctcacgcctgtaatcccagcactttgggaggccgaggtgggcgggtcccctgaggtcaggagtttgagaccagcctggccaacatggtgaaaccccgtccctactaaaatacaaaaaattagctgggcatggtggcatgtgcctgtaatcccagctacttgggtggctgaagcaggagaatcgcttgaacccaggaggcgaaggggttcaatgagcctacattgcaccactgcactccagcctgaacgacggagggagactctgccttaataataataataataatataaggaatggtttattagtagttggagttggaagagacttcctaggagagtgagctccctgccagggtgtagtcttgagagagcagttgaaggccactcatctgtgggcatgagggtgcagtggttctgaatctggcttcagattcacacaggcctggttttcagctctgtctgagccagttactgtttggcctcaggcctcagtttcaccacatttaaaatgggggtgatagcagttcctatctcctagggtgatggtgaggatgaaataagacaccatagtaaaatgcttagcacaggtctggcctggagtaagtgtctgacagatggatgccattattaggcgcctgttgtagagagggccacgcgccaggcagatagttgggctgcacagatacttttggagggaggtttttcaaattgtggatcagggccactaattggaccctaattcagccatgaaatcagtttggtgggtctccatgaatttttttttaatgaaaaagaagagactagaaaatattcaagtgtattgctcagtatcagtaagcattgttgtgtagaacatgtttcgtgtgtgtgtgtgtgtgtgtgtgtgtgtgtgtgtgtatgtgtgcctagtgtcaaataaagtatatttttctgtgagccatggtccaaaactttggtgccactgcattagagattctgtccctcctgtgccatgtttatagagcacctactgaatataaggcgcagcagcagtgctatggccagggtgcctgtcctcagcaaacctcatggtctgactggagaatcagggcccagttcttagcaaggtggttaccaagactgtgggtcagcagaggagggagcagagtggtcagagagggattcctgggtgatgaccctgtgtcaggtggggacgatgagagggggtgatgcctggggtgaatggttggcctgggtcctgggggctggggctgggggctggagagctacctggaaaggtgggaggctgccgtcagtggaaggctgcagggtcaggcctggcaggagctgcccatgcttgctggagcagggggttgggtggaggttggggtctcaggattattcaagaacattacatttattgtgtactttatttctatgattattacattgtaatatatgatggaataattatatatgggtgagggctgtgccagtctccctggctggggtggggtggggtagagaaggactcggccttactgatgccccctcccccagcttgcaggatctgtagtcactatgggtgagacccacgtgggcctggcctgcaacctggctctcagcttgagccctatccagaagccagaagacttcccactatttagatccctgccctgggaagtgcttggcctagtcaggacctcagtttctccatctgtaaaggaggcacactgtctcctgagcggccagcctcctgggtggtgatgcccatcttgtgacctattgtggatgaaccggctgcaggaagtatgaagagctctgggtgggttatgattgtcgtctttaaggctgggaggactggggaaggtcatgaggacatcagctgcctgtctggagagcccctggcctccctaccctgtgacctagggcagtgggaggagaagcctgtgacccatggcaggctggggatatccccagctttgagtgcaggcagcccagtaggggcctcagatgatgagacccagatctggcctaaatctgggaacccccaacctctaaagctccactcttcattgagtaccccaggagtcccagcttaaggggctgtggtggcaggtggagaggcagtaacctaggactgattggcaggggccagttttcaggaggctgtgggtggcttccaacccactgagcacagagcccagaggctcaggcatgagctcccacagtagaatgtggtgtttaatgacaggtcacatatattggcactcctgtgtgccagcgctgtgctaagcacttttatatatttgcaaactttatacaacaaccgaatgcaggtctttttattatcccattttacagggataataaaatgggcctcaggaagctgaggcccagagaggttaaatctctcacccaaggttacctagctagtaaatgggagagctggcctgagggcctgagttctggattcgggatactagagttcaaatctgggtagtgccactttctagctgtgggtcctcaaacagtgactgaatctctctgaccattggtttcttcctctgtgccttcctcaaagggttgttgtgagagctatgtgagataaagactgagaagtacatagtacacaataagggccgaataaatgggacctgccgcatgacctgcatgccagtaactgccgtgtgaccctgggccgggtgtctggcctcctaggtctcagtctcctcagttgtgtgacacagggcactgaccccttccttgctcctctcaatagggttgttgaagatgttggatgggtcctgaaggagaccttcagtgaaatagaagtggtagaccagcggtccccaacctttttggcaccagggactggtttcgtggaagacagtttttccatggatggatggcaggggagggtttcaggatcattcaagagcattacatttattgtgcactttatttctattattattacattgtaatatatgatgaaataattatacaactcaccataatgtacaattggtgggagccctgagcttgttttcctgccactagacggtcccatctgggggtgatgggagacagtgacaggtcatcaggcattagattctcctaaggagcatgcaacctagatccctcacatgcacaatgcacaatagggtttgcactcctataagaatccagtgccactgctgatctgacaggaggtggagctcaggtggtaatgtgagcaatggggagtggctgcaaatatagatgaagcttcgctcacctgcctgcctgcccaccactcacctcctgctgtgtggtctggttcctaaccggccatggattagtatgggtctgtggcctggggactggggacccctgtgctagactacttgaatctccagagctgtcaggaattctttagggtttgcagccaaccgcaggtcccaacggattgtgtttgggcctgcttcaggctttcatgtttcctgttggcccctgcaggcatttgagttggtggctccaaatctattccagggtttcccaagatgttttctgtggaaaggtttagaggtcaagcaggcacaggagactgtaagtcaaagaaaaaaaaaaaaagaaaaataggggttgggggaatggggagatgatagtcaaagggtacaaaacctcaaacagggggcataagttttttccttgagatgtattgtacggcatggtgaatatagtaaatagtaattattgtatatttcaaaatcatttaagagttaattttaaatgttctaggctgggtgtggtggctcatgcttgtaataccaacactttgggagactgaggcgggagacttcagcctaggagttcaagaccagcctgggcaacatggtgaaacctgttactacaaacaaaaaaatacaaaaattatccgggtgtgatgatgcatgcctgtagtcccagctatgggagaggctgaggtgggacgatcaattgagcctgggaggttgaggctgcagtgcgctgtgatcattccactgcactctagcctgggtgacagagcgagaccctgtctccaaaaacaaacaaacaaacaaaataaaacaacaaaaaaaaacacccccaaaattcaaatgttcttaccacccaaaatgacaagtatttgaggtgatgtatatgttaattaacttgatttaattattccacatggtgctcataaatcatagcatcaccttgtactccataaatatatacaactacacaaaaccccaaatggttttctttgctgtagggcttgtcagagcctgtgatatgctaatttttgttgtacatctccaatatgtggtcatgatatatactctagggtatctcaaaggcctggtgtttaaagccccattttccagatagagaaactaagacctggaatgaaacttaggaagggattttcccaggttatgcagttacctgttacagagctagggccagactccttgctcctgactccatggccagtgctctgcccaggatacctcttcctcttccttcttcctttgtcctcagagaagtgttgtgtgtgctgctgtttcctcctgagagctccttacctttttctggccccctcctgcttgctcccagcattagagggtgtctgtttccttctgggcattgctatgagatggagctatgcctagtttatggctgctgggagatccttctcagactaatagatggcaataaggcttcatcccagctgcagggcccctagcaagttaattccatttcctgagcctcattctcctcagttgtgtaatgaaactcatcatcttgtctgtcttctggagtttttgagaagttcagctctgatatcatacatgaacgtgctctactaattttcaatccatatgcagatatccatgagtctgacagttcttataatttctgggggcagtgaggacatgggaaaaggaggccctggctgtgggagctagcatggttggggccctaaagttctgatcccctcccccggccacagttgatgtctgcttttcagtgtactgctgcctctctctgctctcagttcccctgaacatgtctgaagtgggccggtctagctgactcgagggacccatgtcacaggtgagacatgaaatgaagcacgattttcgagctggggggccctattttcctagtttcctgctgggagttggtgttagagtggggaaacaactcaagtgacttggtgcctcagtacagctctgcctggagcagggagttcccaccagcttctgcccagtcctttgatgcccccacccttcatggagggtggccggtcacctggcttgtgatgtagggtgcacgcgggcatgccgatgcctccatcaacacagcagttaggttcgaaatgctccaggtcctctgctagctgtgggggactctgagtgatgggccagggggtaggccaggctgggttgtgaggtgggaggaggtggtggctccctgtcagagagtgtcctctcctggagggctgtttgcccaagttattcttagcacagactcattatagagtctatttttagccctgtttctaagtgttgccaacatctggtgcagccagcactaaagggggtgggggtggcaggggctactcctttggacatttctggggactggagcctctggcaggagagcaaggacagaatcttctacttcctgcacctgccacagcttgaagcttggcatgcagtaggtgtcctattcatgcttgtgcgttgattgctctcccaggatctcatccttccagctctagctcctgtgagtgggtgggtggtggggatggtgttaccacagctggagaggatgagctgaaggtgctcatcagataggtttcccacatccacccctcaggggtccagttggcctcagacccctgcagagaggcctcagaggagggaggcaagccccaaactatggtgcttgtgacagctaccgctgaaggaggagccagcagacattatagggagggggtgtaccactggggtgagactgcctggggttgaatcctagctcggctctttcctagctgtgtaaacttgggcaactcatcaacctctgtatgcctcagtttcctcctctgtgagatggagatgggagtgtagtgttgtgaggattaagtaagataatactgtatgaactgcctaaatagaaagtgctgtataatagagaggtggtggtattagtagcagtggtagtgctatattactgagaagctccgtatgtgacatcctgttggggtgagttgggtaggagacctctcagcttttctttgagtgagatgaggcttgcagtggggctcagaggaagttgttatagccaggcaccacgacagtggtgatgtctgcaaggctgcagtgggggtcaagagctatgtgctgggttggaatctgggctttgccactcacaggttgggtgaccttggatgagtcacttaatcttcctgaacgcccacttctttatatacaagaaagaaatgataatacctgggtcataggcgtgatgtacgtggagctttttgccctgtactgggagcatgggaggacctgaatccgtgagactttttttttttttttcttaattgagacagattctcgctctgtcgcccaggctggagtgcagtagcgtgatctcggctcactgcaagctccgcctcctgggttcaagcgattctcctgcctcagtctcccgagtagctgggattacaggcatccgccaccacacccggctaatttttgtaattttagtagagatggggtttcaccatgttggtcaagctggtctcgaactcccgacctcaggtgatccacccgcctcagcctcccaaagtgctaggatgacaggtgtcagccactgcgcccggctcatgagacttttttgggagtgggggtgttgctgtgtccctttcccatgtggaggatggggtcctgttgtcttgagagtcttgggaaacagcttggcctggaagttgggagggccagggctgtggtcctagctctccctaagctgtgtggtccgcacatactccctgcttcctccagacttccgcaacatggagaggccagagaaaactgtggttttcagattcttcgtcacagtcccagaaggtgccttgggtactatctgggagcgtgggggaggccctggttggaggccaggtggggtggtcctcccactccccatgctgctctcctgctcctcacactgactcctggtgctccatggagcggcttcatcctcatgttttacatatcaagggtccaggccgactttgtctgaaaatgggagtgctgctgctaacatcaacctgggactttctggtaggtgactcccaggctccttgtcgtctgacattttgtgccctctgacttggcatggactcccggaggagtgccaacctgtatatcagggtctggagtgctgtggtcactggattccctgagggctggagtcccttggggtgtggagggcagaggaggctgcctccagggcctctctggggccgggccgccactcaagggtagagcttccagcgctgccccagtctccccgcaccctcgggatgggggtcccctgaagacaatagtccgtctcagaagcagtgtctcacaggagggaggggtgatatgggcagaaaggccctgccagagtgctggcatgtagtaagtgctcaagaaatatttgaaatgaatgaatggaatgataccatcaaggccgcacctctgatctggtgatgaattttccctcgcctcccttttcttccttctcgcccctgctccctcttccccatcctctgctttgtctgactagccataagctaccccagcctgggttccagattcagccttattcataatctagaacaaagacacttccccaatgtgagttacagtttgttcatctggaaaacaaacacgatgggctcaggttccgaaggccctttggttctcaccgtctcttttctcagggcatgggagtgatttctcagagtaggggtggtagaagcacatgcatacacacacgcacacacacagacacgcacgcacatgcacgcacatgcatgcacatgcacacacacgcacacatgcacacgcatgcacatgcacacacacgcacacatgcacacgcacacacacacacacgtgcacacacacacgcacacacaggactcagtgcagtggtcttggctgggaaaggtccttgccctctgaccaggaaggagccctcggagctgaggtgctcccagactcagcactgtttggggcctacaggatgtggtgtggcccactctagctcaggctggggggttcctgtgggtgtcaggggatgggtggccatccaactgtgtccactgggctgggctgccacagtgactttgtgtatgaccttcagggagtgtgggtggcatgcatcaggacgcctatctgtgtcgttatgactgggcgtgagggagggtgccacatgtctagccagccagggagcagggccagttagctcctgttcctgggtgcctcctggctctggggagaatagaaaatgattcatgcaaaggggccctccctgttttggccacagcctgaggagtaaggtggcctggctgtctgcctttccctgctgcccaccaggtgcctgagttctcccctccttcctcgcctcagaccgcgtttctccctgggggtaggtggctgcccttccctgcagcctgacaccctctcagagacaattagaggagtaggctgcccatgcctacagctataagagtgagtcagcgtagggaccggaggggatcaagtctctctgaatcctgcggccagacggtccctgcaccagaagaagtggcccagtgaggcctgggctgggatgctgtggtcagcactgataccagctgagtggctttccagcttgagaagacctgccagggacaggagaggacaagctccacctgcccaccacccgcctcgccatcctggctgcagccagctggtgactcattctcctggggagtgagccagctcctctcctggggtaccccagcaccctggtgcaggctgggtggccaggagtcctgggtgcctcagaaaacctgtgctgagcccagggccctggtaagctggggagggaggactgaggccctctgtatggggtgggggtcgcagccagacttctcttgctccttctcctggcccccgcagacttcaccctccctctggccaaagaggaggctgcaaccccagattacgtaataggtccaaaatgcctcgcaagcgagcagcccagccagtggctagactcaggagtccccatttcccagtacctgccaccagggcaagttcccattcccttcctaggccgggtgggggagtgggtggtgcttgctcacccctggaaagagctgtgctgcctgggagggggtggggaggctttctccagagacatgaattcttggcctgaccccagatgccagcctgcctgcccagctccactccagagtaacgctgggtgcacacacagccccattgtgtgcctgggccccgtgcctgcccagggcctggcaccggctctatcaacagcagtggctccgtcagctcctcagcagcccctgccagtgcttgagcccttgggcccctggtgaggaggaagagggaggactagtgattaagggtatgagtcctgggtggggtaccaggaccttttggatactatcaactatgagagacaagagcagggagacttagtcctgttctccgaggaggaaactgaggccctgagaggcttcagtaacttgcccaaggcctcatggctagtgagaagcagagccggggttggagcccagagctgtggctgagccccttactggtctcgtcacccaatcccagaccaggactcaggaaaaggcacggtgccctctttccacagccccactttggggagcctctttctcgaaaatatatgtccccagggtagaagaggaccctgagacggtaggatctggagtcctgtaggaccctggaatggtaggatttggagtcctgtgtgcttgtgagaaacatgggggttcattttcaaggatggtgctggtggccagacaggcagagcaggtttccagagctggaggacaggctctgtgcctcagtttccctgctctacctgcactgtacatccactgtgccttctaggaggggatagaaatattgaggtgaggtatggccggggctggggactggacccccactgctgagctctataggctgtgcgaagcccccttcaccaacccagaaccccactcaatgcctcatgatggttctattctaagttgggtctgagccatccacctcctcagctttcccagcctgaagaggcctctgagctgggtgagcctgccaagggggcagcccagctcggtgccatgagggccctgcctctgccgcaggcccatgttcccccacccccctgccaaggtgagggtgcccagacatgacccttttggggcctgccctgtgttttactttccaggctaggcttattcactcagagaggcttgaccccctggggcttgggggagctgaagggctcctcccttctccaacagcccacccttttgttcccctgtctgtcttgggcatgaagcctggctccctccttctacaccacctcagcgctcttagcaaagggacagggaattctgcagtgactgcaggattgtgaaatgccagggctggaccttggggacaggcagggaagagagatgctggaaggggacaccgagactgtgtcctttcataccccacctgggaggccagtctcctccattctgctggcgctcattttcctgcatgtataccattcccacccaccagtcagcacaccttcacctaaggccacagcggtggggacgttgagcccagagggccatgtccgagtgtcctctacctggagcctgtgtgggagaggaggaaaccaagggacagccctcaaggagttcacactgcagctgagaaaaccagagaggtgacttctttgtacctgtttctcatttgtaaaatgagtacagtagtatttcctacttcctagtgttattgggaaggccaaatgaattaatacatgataaagccaagggcctggcactggctctatcacggctttagaagccatccttgatagatggttttacaactcaatacaagttttagtattatccatagtggtagaagaaatacaatatatgctatcaggtgatgatgttttttccaagctggattgtaaaaaccatagggcaagggctgtcttattcatccttgtattcctgtttcagacacagaaccaggcttggaacagagtaagtaattgtgcccaaatggtgattagaggtgggtgaagtcagggtgtgctgtcgggaggaggaggagaccctggagcagggcttccagagaggaggagaagttggataatctgtgggagaggaactgggggagggtctgggggcccagattgggttggcgtgagagagcaaggaggtccccttggctgcacccagtgtttgtttagggagagggatcctgcatgctttggaggcccaactagagcgcttggactttatctggtaggtagtggagagcaattgggggtgatggagcaggaaaaaaatggtctttctatgttgctccatctgtttcattttgtttttgctcccttgttctctgaggaatattttctttcttcatttctccaaagacaataaatcctctctgctcttcagcctcttctttctgatccgtagttacccctgtcccaaatccctgcattctgttcttggcttcttctccttggccatcctggcctgttgtccctgctgtgcttttacctggcttccccttcctttatctggtccctgacccaccttctctggaataggagttgggtggagttggacttgctgagagatgggtactggcatggcatgaccacatggtgggagctggtatgaaggcaactgagccaggaggatatcctctattctgatgtaactctatacatccttcagggaatgactctgccccagttatgtggctaaggcccattagaaggatcttactttatatttgtcaacctgtttaatgaaaatgtagatttccaaaatagataaattagggagtgatggaatcttattttctcgtttataaatttagtggaaagatcagcactttgggaggctgaggcaggagaatcgcttgaggccaggagttcaagactagcctgggcaacataatgagacccccatctctacaaaaaataaacaaattagtgggggcatagtggcacacacttgtggtctcaactacttgggaggctgaggtgggaggatcgtttgagcctggaagggtgaagctgcagtgagatgtggttgcgccactgcactccagcctggatgacagagtgagaccctgtctcaaaaataaaaataaaaaataaatttaatggaaagggatattgaaccagatgggaacgatgcagacaactagtgcctttttcatctccttttaaacatccatccatctatccatgcatacatctatccattatatccaccttttcatccattatatccatccatccatccatccacccaccattatatccaccttttcatctgtccacccgtccatttaggcatgcatccattatatccatccatccatccatccatccatccatccaccaaccattatatctactttttcatgcatccacccatccatttatgcatgcatccattatgtccatccatccattatatacatgcatccatctaatatttattgagcacctatcctgtgccaggtactgcattagatactttatgtttaatccttacagaaattctccagggtggatattgtcctaattttacacatgaggatactgcgaccctgggaatttaagtaagttgatgaaggtcacacagctagaaagtgacagatctgggattcagcttgactaggttcaaaacacacactcttagtgtttaatcaaatggcctctgttggtgtcaccagtgcctagttctaagtgcggaacataatagctgtgttattgaatgaacgggcatgccaaggttctggaatgctggagctctatagctctatcctaggagcagcctgggggcagaaggcaatgctgggcttctagtcctactggcatttgctaccagcaacctaatgttgccatcactacccccggtatggaggtttcttctccatgcaacttgcaactctggcaagtcctgttttcttctctctaccatcccagctctccttctgagggcagtcttaaccttccgccaagtggggaagttccaagtacacatttggccattgcatccagcttgaccagtctccccagtgactggtcttcccctagctcacacctgcctctctccttccctgtagggtgggctagcttgcattactctgacccttttattggtccctatttctaagctttagagttagctattcagtatcaggtcataactgcctcctcagggcccattgggtgaggcaaggatatgagtgcaaacagtttatttgggaggctcccccagggagcaccagtggtagagtaggattcatgagacaggaaggcaaggaagctgataaaatgtgtgtgaaggagcaaggtgactgtgggcatctgaggctcactgccattggaggcctctgcagaatatgctttagagttccccagtcaagtgataggtgtctttggctaagaggtggtggggaagggagggagctaacttcattggttcaggcaccaattcaggtgctggcacctggaaatcttcaggtgggcacttttgacatcgtgagggcccagagcatgtggctggggccctgatagcttttgccacctcatcaagcccagccctgggggtctgccaagccctcttcccacatctccctttctatgtccaagaggcttccccaggcagacccttccccagtcgccagttccacgctcactgtgtttcacagatacttagggagcatctacaaggtgccatggacaaaaagaggaagctgtcaggatgcctccaggcactcacagcagaggaaggtgacctgtgcggctgaggcgcctgccatgtggcagacactggctcgcccatcccaggccttgtgcaaggccagcaatgcccctgtggcatggcatcctctcctagagggaggtacagacgtgctgagcgccacagagcctagagccgtcttccacttccctcccaactctagcatcctgaggctgtgattgtagtggtttttctgacttccttttcctttctgtcactgcgcctgcctcttcccctagccccatggccgccacgtggctgccttttagtcagccgggaactgagcctcctagtagcctccctctgtgtctctgtcaggaacaggatacaattcagggacattttggtgggggagtaatttcgtgcggtggcatacctgtttgccctggcacaggctctgtcatgtctgcttcttggagaggagccttcttcccctgggctccacctgttcccatccccagccctcccagcttcaggctacaggtctcgcaccctatagggctgagggaatgggaagaattaaaagagggaagtggcgtgtaggtaaggccttctggggtgggggctaggggaagggcaggagatggggatggggcaggggctgggcctggcggtgtgcttcccctggagacgtggtcctgggccacaggcaggcacgccaagtcacagcccctctgacttcttcctccagccaccagccccagcctttccccttgatgtttcatttccaaaccaggtctgctctgggtgcgtgtgctggggtggcaggggtaggagtgtgtctgcctgtgccattccctaccctgtgggcaggcccagccatggcagcccgagtctatcatctccccactccgccacttggataggaaggtggctgcactcactccaggcaggtgtgttgttgggaggagaacagagaggattggttcaggcattggaagatggggtttatgtctcaggtttgagctcaagcatcttgggtccagggagaaggtgtaaggcagctgctgcctgagtctcaactctatgggggaaagcagagcagctctgagccttggggctgggcaggcaggagggcatggagcccagatgagtggaagagaatgatgatgaaagagcagacttcccgatgctcctcccccgaccccatcacatgcagagttcaacacaccccactcctcgctctgtcctggtaaaggcagagtgcttcttatggtgtttaaggacaggaaaagggctggaagtgtgtgtgtgtgaattttgcttcctgttcctttcatacctgggtgtgggcggggggagatgggggcaggttgggggacagctcactcactccatccgctgggtgggtgacttggtgggctgttggaatgttgccataggaggccatttctcctctatggggggagatggtggcttccaggtcaggtctcctcctctggctccctgacagagatggggtgggaatgccagccggagcgcacatggacagggcaggagcaaagctgaattctgggtctagggcagctgacagcatttgggaatcctggggtgggcccctgttagctcttcccagaaccccaactcttgggcaggatgggggtgggggggtgtaagggtggttgggggtgggtgtaggtgtgtgttgtgaggggagaagagcccccgctgagttcctgggccactgcctgtgctgtctagtggcctctgccagcactggctgccccgtcctgcccccaccaggcgtgactcagatcgaaagcagaagctgccagacactgcacagggtgaagtgaggcagaaccaactctgctattttggaacctggttaattcccccttctgccccccacctccctgctctcagggctcccatcccctccagctgtctggcacttcagcttcctcaaggggacagttggggcaggccttggtttcccctggcatggacgtggaaggccatgctgaggcccctgtccttgctaggcccctctccctggccagaggtgctggattctggggacctgcgctctggggttggggaggaagagcgccctctcctggtgggaactcgtgggcagggcggccctggcgagatgacggtcaccaggcctggcacccactctcccccgcccatctttggccgctctcaggccagctgtcagctgcctctcccaggggtgtgagctgacgagagcttcaggtgggagcctctcccggcagtgaatctgagggttgggagggatttccggacccagagggaagatattttggggccgagggcctttccagaacccatgaaatcacacaccctgctgcgaccagactgaccctccctagttgatggttcttttttggacatcctaggcctgcttgggattctggccccatgatttagggtttctttggagcccatctgagcctggggggccctgtggtggtggaagaggtccagcctgcggtggtgaaagaggtcagtggatgtgtgtttctgagctgaaaatgggtgtggagttgagagctgtcacctcttcatggacagggtggatgagggtccctggcccttcagaagctgtgtcgttgggaagagggtggactttacagctgtcccgtgtgagtgtacatgggagtgggcacaggccttgcggtatggctgcctctcagggaaccctgaagtcagagctccactctgctgattaccccccagcaacctggtgaggaggatggtggtatactgggggagaggggagtcagcaggcaggtgaccaattaaaatttgggtccttgccaacctcaggtgggcaggacgtaggtttctcattgttcagatggagctggggtttaggcaggtgggaggcagaggcagagccgtgtggaggagagagtgggctcctagacctgctgtgggagcctccacactcccaggcctcctgcggagcacacaggcccaggcacacactgtcccaaaggttgtctgctctcttctggagctgctctttgggcaggcaggcaagtcctggtgcagtgtgtgtgtactggtgagtgtgtatgtgtggacagtggcttatgtgtgagaggtggtgtttgcatgaatgggtgtgtctcatatggtctgtctgggttgcttttccactggtaaccatctcggctttgaagctgtttccccatagacctggattgttttcccctcctgcacgggccagagccccagcacccagtgagccagagcccacctgcagccttgcattctggcctccaccttggctcttgagcctgagaatcaggctgcttaatttccctgtggggctcagaagggccctgcctgtcctttaaaatagctctgtgcttccaccaggggcctgtgcttccctgctgtgttctcccacccgccaccaattttcatgcttggaaccagggaactaagtccccagaaggcaacaagtaaagtgtctttaatgtgcccacacatctcccagggcagtttgttaaaatgcagattctgactcagtgggtctgggcagggcctgagagcctgtttctaaccagcaaacagggcgtgcaatgccttaagaggccctctcccatctaaggccctcactgtccagccagatggctggtggtcacccaggcagggagctagtactcacagaccacctccaaggtgctaggcacatcacatatttcagttccatttaccccctcactgactctgaggaaggtggcattaccgccatccttttgtacagatggggaaactgaggctctgagcggttaagcacctgcccccagtcacaaagctgacaaatggcaaagccagatttgaattctggtctgtcagggtccagagcatattcgtgatccactaagcccggctgtcttccagagggcggactcaggacagatgacgtggtggaggtggaggcggggtcagaggctctgttggggaactgcaagggtagtcctgggtggttttggatggaaaggatatcttgaggggaaggagggttgaatgggagtagttctagaggaaacaagagctgaggggaggctggtgtcctgcacccacctgcttagccaagagccccttcactgatgggctcaagaccccctacctgcctcctctggcactttccagacagactctccacaggggcacccagcacactgtggggagaccaggcgccccagttctgctacctaccaactgtgtgacctcgggcaagttttcagcctctctgtgactcagttgccccctctgtaaaacaggggatatgtgaacgcctccatcatggtggatggagctgtggtgaggattaaatcagtaacacatatcaatgcagaacagtgcctggtgcagagtacgcactcagtgtgcatagtactaatgcctcttggtttgcacctgagagaaaacaggccaccttctgtgaattcaatgcaatcgtccatgctcatagatgtttttgtcctttcttcctccattcccctctccactgtcttcttttgtttaggaagacctggctacttcagttgtacagtggttgtttccaaagtactcagaagcaggtttgactcttaaaaacaaagccagggaatcgttctttacagcagaccagccacagggaggctggggaggctggggaggctgaggcagcagatgacggaggaggagcagccccaggagcaggggcaggagccaggcactggcggggttggagtgctctgaggactttgggcctggggcagggagggctgaggcgggggtggcttaggcactgggaccctgagagccattattagaactcaggacagatgcagggggtcctgggcctgcggctgggtttgggaccaggagccagaagctgctctgcatgcccgctgtgtgcccagctgtggtcgttgtgcctgcctcttctcacacttggagtcaacgagccttccctgccctaagcagctggcagctagcagaagatgctggagtgtggattcttttctcctgaggagatggaaaagcaaaggctggatcctaaggctgccatggctctggagagggagctccccaatgctggggcagccagcacatgggacagtgaaaccagtgcctggcccttcccctcccagcctgcaggccgattccaccggaccagccctccacacatccatgctgccagaaccatcagcacaccaggcaggcggcagggagcctatgagaggtcccacacagcctctgcatgttatttgtgagggtcttgagtcccggagagggggacaggacttgcccaaggtcacgcagctgggtggtgcataccgatgcaggtcttccagtcccactctggccttaggtaggcttttgtgctgggcctgtggaggctgagagagtccttgcaaaacagactcatctcagagagtcagagcttgtgggccccaagtccacaatggcatgaactgaccaatcagatagagtcttaggcctcaccttccctggggagggacctcattgaccacataggctgacgtagcatccatgaaaactttagctgatctttcctgcaggggacatgagcaggttcgctggggtgggccagagggtacttggggcaagtggagtttcagtctctaaacccctctatcgccctcaggcccctttcctgtcctaggagccatctatggctgagtcccactcctcccccaacccttaccaccctcacctcactatggtctggtgccagatctctgatccctggaatcacatttctgtctgaccaactcatatagcctccccttccgccccctccgacccaggctctcgggcgggctaaccgtctcagcgagattcagatttgtcaccctctgagcctcctgggcatggatgtcttggctatttagcaaaaagcatctgtgggtggggtctgggagggctgaggagcatgcaggcctctctggggaacctctgtaggattcgctgagggtgacatgggatgaggggggcgcaggactgggagtgcaggggacaacaagccatctacatggggagacctttcctatgggccccaggttacctctcctgggctggagctgctggtggtcacatacctgagagacctgggcttgaacccccacttcactgtgctcttgcagtgtgacttctgacaagctgcttaatctttcttttttttttttttttgagacggagccttgctctgtcgcccaggctggagtgcagtggtgcgatctcagctcattacaacctctgcctcctgagttcaagccattctcctgcctcagcctcccaagtagctgggactacaggcatgtgccaccgcgcctggctaatttttgtatttttagtagagacagggtttcaccatgttggccaggctggtctcgaactcctgacctcaagtgatccacctgcctcagcctcccaaagtgctgggattacaggcatgagccactgcgcctggcctacttaacctttctgagtctcggtttcctatcctgctgtgttgctgtttatcccatcaagtgtttgtgtggatgaatgtgattgaacagaggccccttgcgcagtgcaatgtgggagggactcggagcgtttgccaagtgggtgataactgagtgtgtgggggtcactggaccagcagcccttgagggccgtgcatctctttctggaaagtctgatgggtgggatggtgtggaggttctgaagaagaaaagtgatttctctgaaacttccttgtagctgaggagactggtaggtggcaaggaaacaactagagaacaaagcatggcagacacaggcaggaggctggagtagatggagtgcccaggaggcgggtgcaggggcacaaggggtgggggttcagtcccaccactccccaacccaggagaaaggtggctgcctgctaaggggatccttagactgcaagcggcagctgagggatgcggctacacgtgtgtgcacatggacatgtgtgcatgtgtgcgtgcatgtgtgtgagagagaagagagaaagagaagcagacacggagagacagagcgtccacatgggtggctgggccggtccgtgcatatcacaggggtggaatccttttctagtttctcctttcatgttcctattagctacatgtccctcgtccctgtcctgccatgcccagtggcagtcgtctttgccagggcccagctggtcccagtgggacaggacagggcgactccctggtctgcaatggcctttgaagctgctccccctgttgtcccgggccaacagtctgaccagccaggaggcgccagttcccaccctttcctgtgggatgtgagctgaaacttggggctgatgggcctgagctgtgggaacaggaggccattaagtgggccaggagcttgtgtgaccgcccttcctctctcctctccttcctttccctcctccccacctcctgctggtgctcagagatttaaaaacaagcccctgactgccccctgcccccagccctgcagtctcccgcagcgcattcctgcagggggtctgggagaggcggtgcagaacgcatcctggggtcttgctctgctgccactgaagcgcattgtgcagatctcccttttggagcctctgcttcctcatgtaattcattctttgtttcttgatctttttttttttttttttttgagacggagtctcgctctgtcgcccaggctggagtgcagtggcgagatctcggctcactgcaagctccgcctcccgggttcacgccattctcctgcctcagcctcttgagtagctgggactacaggcgcccgccaccatgcccggctaattttttgtatttttagtagagacggggtttcaccgtgttagccaggatggtctccatctcttgaccttgtgatccgcccgcctcagcctcccaaagtgctgggattacaggcgtgagccaccgcgcccagcctcttttgtttcttgatctttattcatcacaaataggggttggtcagtcctcagtaagtgtccccacttggcagagcggttccatttcatgaaatatactgaagaccacatcctgcatgacagcctttgtgtgctgttggagaccatagcactcagccatggtgatgcaggacagggtcccggagggaacctgccagggtgatggtgacattctccatcttgatctaaacagtgattatacaaggccacacacctgtaaaaattcattgagctgtacactacaaatctatgcattttgctaggataagttacacttcactaaaagggaaaaagaccaaaacatggcattaaaactgttaaaagcatgtgcgtgtcccattgacctcatttctgcttctgatatcaaggacctttcaatcaaacagtgcacacttaccaggtgtcctgggtttgctatgtttctgtatcggaagttgccagctaatataataaaaggctatattatgaagtatctccagtgtgccaggaactgtggtaaacactccgactacttatcccttagaacccaaaggagtggacattgttattgctcacctgcctctctcatctcctgcagtgaatgacatgatatacaagctctggaaaagaaaatcttaaaagacccaaggcttttggagaggaaacagagggctcctggtaataggaaaagctggcctgaggccttcctgcccctatctagtaaggagagactgaagctggggttaccactaggctgctctgccccagtctgggctttcagatggtgtgtatgtgtgtatgtgtgaatgaatgggtgaatggatgggacactttccccaaaggaacttatgcagggatgcccccagtgggcctggacggagcaacactgaacagtgaccagaatggtgacacctcccctctgcccacaaattcacacctgcaagacaacttacacacccagcctcctcacttagagcacaactgctatgaggtagacgtggccccagctggcaagccctgcttgactgatggggagactgaggccatacccagacaattgagtccagcccaaggctaagacttgaacccaagcacttggcctttcccacagcatcatatgggcaggactgctggctcctgggagtcgtaggatacctttccacccctcactctgtttgggtctgggccatctgatgccccctccccaggccctacagtgactcatgaccacctccgtaatgtggaatggctttgtccatgaggattatgtgatgtccttgttctgtttcctagttcatcaggacttcctctgctgcctcctctgccagagggggctgagaaaaatcccaagtttggtatttttttctctcttcccttccctaggctgaaaggttcctaggaggccacaaagcccttcctttgcctccaggaatctcgaacctgttcaggaagcttttgtttagcggtcagtttctttccccaggactgaccgggcagctcccccacgactgagagtgtaacagactgaatcagaagaaaacttcttccgaccacagaggtgcagagcgtcatcaatggcttaaacaggcctcccagcctctgggcttgcacactttgttgtttcagccgccagacatatgtttttctgggaatacaggaaattatctctgctctttgaggaagggtagaatttttttttctgcctgtgtttggggattccagactgttccatcatcccggacaccctctggctcctgggctggatgaacgagatcagccgctgaaactctttgatcgcagggaggcttcttcagtgagaatttctaaaacaaaacgtggccgccctcaccctgaatgcaggactgaggccaaactcccagccccagggttggggcggtgcagccagactgccagggtccagccttgccactcattagctctgtgaccttcagcaagtgaccacctctctgggcctgtgtttcctcattccttgaatggggacaataatggtacccacgtcactcatatcatgaaataattatgataattacataaggtgctttgaacagtacctagcacacagtaagcattctatgagcattagctgttagcataaaatatttttttttcaattagaaagatatacatcttcattctagagaaagaataacattccaaaaggcttttaaaaccacacaaaatacttatggttacatcatccaaagaagtcagtaataattttgtatatttcctcccaagaggtttttctatacatatttttacattgtgatgatcagattttatatacaatttccccctacatcctacattttgtcacctgacatatcctcatgttatttattgtaagtatagcagtccatcaggagggacacaccgtaatttatttaactatcctataactggacattgaggttagttttgacttttttccatataatgtgaagtgcatctttatgcacaacatccttttctgcatctatgattacttccttggactggtgaatatttttcaaggctttgacatatattgccaaattgcttttccaaagaggttgtaccaaggtatgctctggcagttgtgttgaaggtgcctggtaccaaaggcattttaaagtcatagacacacttggggaagggggggggtttggagaaggggtggtgttggtgaaggtagtttccctaactcttcttttaaactatttaacgtctgccctcattctttttttttttttttttttgagatggagtttcactcttgttgcccaggctggagtgcaatggtgtgatctcagttcactgcaacctctgcctcccgggttcaagcaattctcctgcctcagcctcccaagcagctgggcctacaggcatgtgccaccacacctggctaatttttgtatttttagtagagacagggtttcaccgtgttgcccaggctggtcttgaactcctgacctcaagtgatctggctgcctcggcctgccaaagtgctgggattacaggcgtgagccaccatgccaggctggtctgccctcattcttatgtgattttaaaatgagaatacaacacacatacagaaaattataagttgtaagggagcagctgtacaaattattgtaaatatgacactctcatggcaccaacacccatatcaaattacaaaactttcctaatcctcttacccaccaagccatcttgtgtcccctcccagacactcccccaagggtaattaggatcctgagttctaacatagtagattaatgttgcgtttttttgaactcatatacgcagagcatgctgtatacacttttgtgccttggttctttcgttaacattatgtctgcgagagtcatctatgtcatgtgtaacaacagtgcatttgctgtcattgctttgtagcatttgattgtatggatgtaccaccacttcaatttattttatttatttattttttttgagatggagtctcactctgtcacccaggctagagtgcagtggcatgatctcggctcactgcaacctctgcctcccgggttcaagcgattcttctgtctcagcctcccgagtagctgggactacaggtgcacaccaccacgcccggctaatttttgtattttttaatagagatggggtttcaccacgttggccaggctggcttcaaactcctgacctcaagtgatctgcccgcctcagcctcccaaagtgctgggattacaggtgtgaaccaccatgcctggcccaccacttctttatctatctttctttaatggacatttgggtggtttccagttttggttcctatacacgcaaacattctagtatatgtgctttggtgaacacgtggatgcttttctggtgggcatgcataggagggggtccatgggtcatggagtgtgttttcagcttcctgctccaagttttaaaggatcatttagagggcagaaaaatccccaaggcagttcaggcctcacaagccactgaatggactggcgtcagctgacaatagtttgagggcactgcatgaagatggtactcccctcagaagcccttgtctggggctgtggtagaaactgagtggggccctggccctccagctccaaatgcttggtggctgctggccctggctctgtgcctctgctggccactcggtgtcctcacccagggaccgcggctggcctaatgaccactgcaccgagcagggcagggcttgggccagcccaggtggagctggggggattccttccccttggcgacccacctttggacatgactggaagccctggaagcaggttgggcccccccataaacccccagaagctgctgtgcttcctttctcctgttaacagaatcacacaagtcgcacatattcccactgtaagagctgagtgcttctccagtggaacgaagaactataaaaatccctctttatccctccccctccattgccccttcccactcccctccccagcggtaacaactctgaacagtttggggtgctgggagagcccagaatagtagttaaagagtgggggctgtgagccagcctgcctggatcaaatctccattctgctacttaatcagctgtgtaaccttgagtgagttccttcacctctctgtgcctctgtttcctccaggaaaaatggggataatactagtactcagctcattgggttgttgggaagaaaaaacagaattaacattaggaaaagcacattgaccagccctgacccatggcaatcattcacgaagcatttagcggttggtactctgatcttcctgttgtctacacatataccatttcatgattcatgggctggttcatactaaggtgtaaatgactgacaggcaaggcccacacacagactggatgaaaccagctctggcctgaccagaggagaccgggatccctggttatgaagcgactgccacacacttaccttgaatccccccaatggccccaaaaggcaggtgctgtgattagcaggtgctgcgttttagagaggaagacagcctagcacagagaggtgaagtagctttctgaagtcgcctagccagtaggggcagtgagcctgtgggattacagaactcattttggacatgactaagctggaacccagtctgggctttgaggcagagtcagctgagaggctgtgggtggacagcagcaggaggcagctggagggtcctgggggtgttgatgggggcagccatgtgattggggagaggcagggattctctgggggcatcaaacccttcctctcaggaggagggtgttacctgggaggggcaggggagaaggctctccagggaagtgccccatccctggtgtctacatgcagtaggcactccaggcccccagtgttactgaacctgtacacagtggaccctttccaggcatggtgggtctgaagggccagatggtgggaggggccagggacattttggttctcccatgtccatcctcttagttcttcctggctagactgggtgtcaggggaggctgagagtggaccctcaggattttagagtgagtaggcatgcttggaggctaaggatggggggattagcatgtcctggaccacccccatcgctctctgatcccctcaggtccctcccttaccccatacccatcccacctacaccacactcagcaacccaggctggcgaccagggccaggggagagggctggagcttcactggaggacaagctttgtgggtgtgacagctccagcggtggggttggggagcctcactaccctgccagcctctgtcaggggacagtagctgaggctactgacacccactgatgcacagacacctcactgtgtccacttctccaacgtcctctcccaggaggctcacccagattctggcagggggcggtggggcagggattcccaagtccattgtgcagatgagagaactgaggctggcccagccagtgagaggcagggtccagcccaggctctcctcatagcaaagccagctccagtccacgcgaggccaggccagacgctcagctctttgtcagagaaacaaggggatcattctcccctagccctccctgtgccggctggcactgccaggcccggtgcccacacccccaccagggccaactgaagtcagattgtccccaagggtgggggggtgagccagtgccgtgtgggtgggtgtgtagagggtacagctgcgagggggtgggttgggctggggtcagagcctatgaggtctgtagggctagtgtgcgtgtggtgggcagtgggggtacaaagacagggataaccctctgtagcagcataggaagggggtgggcaaaggcatgggtggaggctgcagctgtgttcctgctgcaggatgggaagggagtggtgggcatctgctcctttctttctggggactgccccgttggtagctgggtggagagacccaaggagctgagacagcccctttactgattcatggtgtagaggggcagagaaggaaggagggtggggtgagggccactgcctgccttcctaccttgtcgggaaggcacagtggtggtgggaggagccctggctggcagtcaggtggcatgggctccattcctgggcctggcagccaggcagcctgcaataagcttcctccctgctctgtgtggagaccctctcctccccagcatgggctcagaggccatgctgcctggggctgggttccagctctgtccctttcactgctgaaagacacttaatctcctgtgcttctgtttctccttatctataaaaggagagtaatatgcagaactacttcatagggctcttccaggtgaaggagtctggaacattgcctgacatacagtaaatgctcaaataaattcaagttattattatttctattatctggtgattttcactgaatatttgccagttctttttgctaatgctgactaagtccagtgtctggtattagccagaacatgtcagcctttgctgcttccctttgctatcccctgaggtctgggcctcattgttaggagcttgagacacagctctggcttctggtccacactgatcagttcgcctgccagtcatgtgcccatccatgtctcatgcactcagcctcccaggtgctacatactgtgcaagacctattaatttcatatagtgctccaatcttctgaagcagagaccgtttactaatgagaaattgactctcagagaggttaagtgacttgcccaaggtcacacagcaaagaagtggcagaactaggattcaagcccatattttctcagttcaaaagtccttgctcaaccacaaagtcatactgcctcttgcaatatccccaagatgggaccctccagcccctaccaggaccttcatggggtctggacacactcaggagccctgcacctctcagagtctcagcctgtctcagctggggaggaccttagaaattactgggtccaaccctttcattttgtgcatggagagatggaggctcagagggggaggggacttacccagggtcacttacctagggtcagtcaatgagctagggacagagtgggccaagctgtaggactcattcttccctgtctttccttccagactgggctggggggcttaagtcacacctgtcccactgagacctgtaggagattagggctgatgtgctggtgggaagtcctctctgggctctggcagtgccaggtgcctggaagtggccctccccatacaggccctcctaagcctgtggacttgcccttctctttattacactgtaggctccatgagctcaggaactgcagttgtatccccattgcctggctcacaaataagatacatttcttcacacatgcattcagcatatgccatgtcccaggtcctgagccagagtcccatggtatagcagtgaaaaagacagaaaatgcctgccctcagggaagtttgcattcccagtaagaaagagacagacaatgaatgaaatagctaggcaaaaatgcattgtatttaagatggtgataagtgatatggaggaaaataaaaacaaaagggaaggggcataggaagtggtggtggagggctttgtaattttaatagggtggtcctagaaggtctctgtaaggtaacatttgagccttggaggaggtgaaggagtgagccatgatgtcatctggggggagagcattccaggcagagggaacagcaagtgcaaaggtcctgaggtgggggcatgcctgggatgtttcggggatttcaaagtgcctggaggatgtagccggagcagataaaacaagagggagagctggcggatggggtcaaaggggaacacgaggtgggccagatcctagggggcctttccagtcatggtaaggactttagcttttcccctgaggaaggtgggaaccatggggagttgtgagcagaggggaagacaggatctgacttaggatttaacaggagttaaatgagttgctctactgagttgccagtagaacgtcctagggcaagccagaggaggcagtctgaacactgggctactcctgcgggattccaggtaagacccaggataggctgggcccaccttgtggcagcaaaggagggtggatatgaggtcggatctaacaggatcaggatgtgggcgtgacacagagaggagtggaagttgactcttagagtttgggatttaccaactgcaatgagtgaagaagacagaaccttcagttttggtccaggaaccaggaaacttggattcatgtctcagctgtcacccgcttgctcagtgaccttgggcaaatctcttcccctctcagggctcggtgtcttctcctctaaaatggatgcggtcccagtcattctggcctccccctgccagcccctgtgctttgaggaggacacgtgcctcatatacctgctgccccttctcatccacagggagccagcgccggcagccaccatggcgtcacgcatagggttgcgcatgcagctcatgcgggagcaggcgcagcaggaggagcagcgggagcgcatgcagcaacaggctgtcatgcattacatgcagcagcagcagcagcagcaacagcagcagctcggagggccgcccaccccggccatcaatacccccgtccacttccagtcgccaccacctgtgcctggggaggtgttgaaggtagggcctgttctggcctgccccccaccctgtccccactagtcccagcctcccctagagcccttgccttttccccctcccaggtgcagtcctacctggagaatcccacatcctaccatctgcagcagtcgcagcatcagaaggtgcgggagtacctgtccgagacctatgggaacaagtttgctgcccacatcagcccagcccagggctctccgaaacccccaccagccgcctccccaggggtgcgagctggacacgtgctgtcctcctccgctggcaacagtgctcccaatagccccatggccatgctgcacattggctccaaccctgagagggaggtgagtgaggagctggccagtggccatgctgcttgcagagctcgtgcccactgctgtgcttctgagactcccagtctaatggcagaggcaggggtgccttcagggagactcagtctgaggtggggacagagcccttctcagggagccccaatctcaggggggaagacacagccctgccctcagggagcctcacagaggaaacgccatccttactttcaaaagctctgctaggaagtcaggtgccgtggctcacgcctgtaatcccagcactttggaaggctgaggcagccagatcacttgaggtcaggagtttgagaacagcctggccaacatagtgaaaccctatctctactaaaatacaaaaattagctgggcgtggtggtgcacgcctgtaatcccagctacttgggaggctgaggcaggagaatcacttgaatcgggaaggcggaagttgcagtgagctgagatcgagccactgcacttcagcctgggcgacagagtgagactccttctcgaaaaaaaaaaaagaaaaaagaaaaaagaaagctctgctagggagaaacagaagacttatccaggaaagcccagcacactccccaagccagagacagaagtgagatcaaggaagctccctgggcaggtaggctccttggcaagaaccgtagcttcatgttgggccagtgggacctggacagctcatctcttctctgggcctatttcctctttccccagataagtaggttgggtgaggtgggctccaaggtccctccaggtcagtggttgtcccaatgcctctttcccctgcccacctcgtggtgggccctccccagatggacttttctcttttccagttggatgatgtcattgacaacattatgcgtctggacgatgtccttggctacatcaatcctgaaatgcagatgcccaacacggtactcctggctagggtggggtgggtgtgcaagggttctagggaggggggcacccactgtggctctgagcctggagagagtggagacagggttctcactgggcagagctggcatgtttctgtagagatgagtcattttcattaaataatgtgacaaaggccggggccaagaggaattatgaagcaagaaggatgtgcctcagcctctgtgcaccatggggcttcagaggggagaaggggctggggacacggagtgggcctgtggggggagctttccaggttggcgaaggggcagagggaggcagggagagcactgcatgggtggaggggcagtgtgtctatgggaaggtgtggaactaatgagctcctttggggacctgggcctcccctcctttaccaaacccagggcccaacaggcaaaagcctgtctgtgtctcttactccatggggcaagtgatctggggctggccttgtccccaaccacaggaacactccctctggcagcttcctgcgtctcctggcagaggtggggtagcaggtggggaggtgctgggcttggagtcaagaagcctggcttctggcttttgctgtgaccttaggaaatccctcaagcatactaaaccccagttttctcagctgcaaaatgggggtgatgctctctacccacaggattgtgggaagattagatgagggaagaaattgagggcaagctctctacaaaggtggcaggtgtgtacgctgggcaggtgggattgccagcgccccttccacccacttttctttggagctcctgaacctcagctacttactcctgcctttgggcatgagcctttcaccctgatcctggccccagcccatgccaccaagggaaagtccccagttcctgtggtggggagtcaatcctctgtccccactgccctggtgacatcgctgagtggcttagtaggagctggccgggactggttgggtccaaacctacagctagcaggggcagcgagggctgaggagggagggaggatgcaagtgattggtccctttagtagttcctgtgtacactgtggggtgtctgggcctgtgatttgttctgcatgtttctgtggcagatctttccagagctcagatctctccctgtcagactcctgcttcaacttcccttggctgcccattccaaaattccagtatctttgcaagtcaaacactgtactggggatccagatacatctgccctgcctacagcacctccacccccaccacttctgcccttgagctgctggaattgtgctctgccaagctgccctgtctgcttgtgccctggtggctgcccggagtgccttgcctcacatctctgctcaagactcagagttccacaccctccaggaaaccgtccagaaactctagaattgattagatgacctgctctagggcttccataatgcctggggcctaatcctatcacatattattggttggatcactctctcagacactctaggccaggggctccttgagggcagggactacatcttataatagctctggactctgcagaccttcaggttgaattgctgggtgaaagggcccaaggtgaattttgacactccaggtgtccccaggaaggactgctcctgggatgataggccctagagggggctccccgtggagagggggatactcatgggtctccctcaccccctaccccacagctacccctgtccagcagccacctgaatgtgtacagcagcgacccccaggtcacagcctccctggtgggcgtcaccagcagctcctgccctgcggacctgacccagaagcgagagctcacaggtactgcctccctctacccctgtgcctttgaatacccgactcctccctccttttctccctccctcccagctcctctctccttctcttttggcctccagatgctgagagcagggccctggccaaggagcggcagaagaaagacaatcacaacttaagtgagtcctgccccgcccctctccctgcctccctcttccttgttctcacctgggctggctaaaaagccactccctgacctgcactggtggaaggcttccctgctcaaggccaattcacttgcagatggcttaagccctcccattgctgtcgctcagtggtgcctgggactattagtgctgtctttccactaggcctctttaggagtgggtaggaaggattcctgtaagggatattcatgaaacccccagtttatcaggttgttttctgggttaaggcatggaacctggggcatcagagttctgtgtagcagggaagagtcctaccccaggcagctttgctgtgctacgagcatcaccatggctgattctacctttcagtgctcttaattgtgtctggcctttgccctggaccccctaattcctgtagaaatcccaatctgttggtcacctcttacttcctggaagaactaaatctaagctgcaggctgccctgaagcacccctccctgggctgggtacttctccccatggggtggggggtccccatccctctaattgctccttctggaatctgttacctttagttgaaaggagacgaaggttcaacatcaatgaccgcatcaaggagttgggaatgctgatccccaaggccaatgacctgtgagcaggtttctgagggggagggtgatgggtctgggtgggcagcagctgacaagtattatctgccctcagccccatgctagttactaggatgggaggagaattccttctagaagttcatctatttgagaaaagatctctccctctcccaaatcaggaaagaatcaggaaagctcaagacagatgagtttctgtcctggaagtgaggctgaggtcaagggaggcttcttggaggagcagtcatgctgagaaagttttcttaaggccattgggctggcagacaagaggccgggctcacgcctataatcccagcactgtgggaagctgaggcaggcagatcacttgaggtcatgagttcaagaccagcctggccaacatggcgaaaccccatctctactaaaaatacaaaacttagctgggcacagtggtgtgtgcctacagtgccagctactagggaggctgagacaggagaattgattgaactcaggaggtggaggtagcagtgagccgagatctcgctactgcactgcattccagcctgggcaacagaacgagactccatctcaaaaaaaaaaaaaaaaaaaagaaaggtaggctgggctggagtcttggtagtctgggaaggaggctgctctgaattgcctggtttcatgagattaatgaagtgggcagtggcaacagaagtcaccaggagggcccattctgtgcaaactgagatcagccacctccacctccaggtctggggttgctgggtaagactgggacaggccacataagctctgcaaccagagcagtagcaaggatttggccactcttctgagcatgcacctctaatttgcctggcctgctgctgcagggacgtgcgctggaacaagggcaccatcctcaaggcctctgtggattacatccggaggatgcagaaggacctgcaaaagtccagggagctggagaaccactctcgccgcctggagatgaccaacaagcagctctggctccgtatccaggtctggtcctgaacttggacttctttggtaactctgacccttaacctggctcctggccctaaggggcagtacttgtacttctgaagttggagacacaggaataatgcccattaggaaggaggatgtatcagttaggatgttttgctttggtaacaaacaatcctcagcatctttaagcaacacatatcagctggaggttctgttctgtgagaccctcattctggcacccacgctgctggcacccagctctctgatggcacatctagagctggctcttaaagccattgtcactcttaaggtgccacatgtcacttctgttcaatgggcttggccaatgcaagcacactctacaagtactctaacctcaagaggcaggaaaatgcaaacctatcatgtgcctggaaggtagagagctggaatcatttggtgggtggcactaggaatctccacagggccaacctaaagaaccaggagcttggcagagtcagccctaccagctggaactgagagttctagtcctggctctgagttgagggcctcttgtcctctttagacctgaggctggccctttacacaaagggcaattggactgcaccttgtttctctttcttatggtagatgacacaatttacattaaaatctagcacacacaggcacaaagtgaaaaatcagtttcatgaagtaacgctcccctcgtccttaatagatgcaatgcattctaataatttctattctagtctagtctagacaagtcaatttcaattaaaaaaatagaaagctggtcaagactcactacggtggcttcacaacccactaatgagttacgacttgtagtctgaaaaaacactggtctagactctagagctaccctatgctttcttccagcggaaacactttgggtcttgggtgccgtagggcaggggcaagtgctgtgatagaggcccaggggaggggtcctggtggctggtgcccataggtgtgttccccagccttctgtctgctcccctgcaggagctggagatgcaggctcgagtgcacggcctccctaccacctccccgtccggcatgaacatggctgagctggcccagcaggtggtgaagcaggagctgcctagcgaagagggcccaggggaggccctgatgctgggggctgaggtccctgaccctgagccactgccagctctgcccccgcaagccccgctgcccctgcccacccagccaccatccccattccatcacctggacttcagccacagcctgagctttgggggcagggaggacgagggtcccccgggctaccccgaacccctggcgccggggcatggctccccattccccagcctgtccaagaaggatctggacctcatgctcctggacgactcactgctaccgctggcctctgatccacttctgtccaccatgtcccccgaggcctccaaggccagcagccgccggagcagcttcagcatggaggagggcgatgtgctgtgaccctggctgcccctgtgccagggaacaggggccggcctgggggctgggagggccaggggcacctccctcccacccttcaggctgcactgtgtgtgaagtagccacctgccctgcctccctcctccccgttggcccctgtttggacttagtgcctgtctggcagcctgtggggtcaggagaagcacccccagggcagccctcttgactggcgcagtgggaagaggccttcagcccctctcccggagatggaatcgcggggcagggaggggcagggtgttctagaggtgagaagagggcctggtggagattccctgtcttctgagcccgagcccctcattaccagtgaaggacatgcttgaggggttcgggaagctcctcatctgaggcaactggtcctgggggtgctcaggcctgcctttttgggactcagatggcaggaggtccaccccgcagcctggtcctcggctctcccacaggtgggcaccccccactttggtgctaatagctctccaccaggtggtgtgagcgcgggggctgccagaagcgggaggggtcactgccggaagagcagctgccctccgacccctcactttgtgcctttagtaaacactgtgctttgtacttgctggtcctgtctctttggagtgggtctagggctgacagcgaacgggaggattcaacccagcgggccccctccagagtgcggatgctgcctgaagggagtcggggtggggggtacagggaagagggaacacgcttgtcacacgcctcagccctgcccggggaagacgaggggtttgggtgctgaggggggcacggtccctcctcacggccacgaggtggcgctgcggccacgccggttccacacctccagcggcggccggagcgagactagttgatgtggcgagagggttgctcacaaaccaagtgcgccgcccttagctgcttatttggggcaccctgggcccggggtggggggcatgcttcttctgtcccacccctgttctgggggtgacctccccaggtgggcggccacccggcttgagaagctgtagctgggcgctctggaggcggcgctcgcgctctgtctgccagacgggcttcccggtaactgaggggctgcgtcctgctagggctctggggaaagggacccccgtgagctagacagggaggagatgggagtccaggacggcgcgtggggtgttatgggcccgggtccccccgccccgctctggctctggcagcgaggcctgggcgcggcctttcctccgagctgcagtccttgggcctctgcttggagacgttggtgtttatgacctcgcctaggagggggacatgggctggggacagtcagggttcgagtggcggctgctcgagccccggtgcctggcgggaacagggagagggcttttcgggcttcatccagttcccctctgctctccacggccgcttcaggcagagaccaaaatggctccccgtcatcgccctgagaggctgaaggggcctaatttaaaaaaaaaaaaaaatcccgggatgaaaatggctaatagggcaatttcctctgtgccgaacgggagatcaaatcaacgttgagcaattagcgtgcgaggggagagaaggaaaatgggccgggcggctgggcgctgatggtggccgggctggcgcaggctgcaggattaatctcaaggtcagatggagccggggatgaccttgtggagcctgagccagccggggcgctggcgcctcctcctagttccaggttccaccccaccacctgggacttacccatgccctggaaacccctctgagccccgtctgggtcaagccctgaactctgtgagacacctgattaactaggcttggcctgccttggccgggggatgaaggctccgggaagtcccaaggccggtccttcaggcccctgagaagtctctcccgaccccactggctcttccacttcaccctggggattgacctagtggagtggagggctgcccacctgcttcctctcacagcccttcaagatcacggatagcccttcctgccagcagatgtctgctaaaaagaaataaatatttaaaacatttttaaaaaggaaaaaaaaaaaaaaagaaaaagatcactgatatccccgcctccacctgcctgctgctttcctgcccctgggctccttcagcctggccactacctctggcattggagtatggactgcatattcgacaggacagagggtgtgagtggggttctgtccacaagagggtgccctgggccaggactaggcagctgcccgccgcggctggtgggggtgggggagtctcagcttcattgtacattccaagctgtctgcctgggtggctcccatcctgcctgggagtcctgcagtcctaccgatttggctgaggccggcccagggactacttccggtatttcaataagccaccagaaagtgttcctgtttctgagaccagcctgaaggaccctcactttgtggctggaatggaatctggctggtgattatgaacgactctgattcaataagagggcaatgcatccttcagcaatatttatttggtggacaacacctttccaagtgtcaggtccatggaggaaattcttttttttttttttttttttttttgagatgaagtctcactctgtctcccagactacaatgcagtagcgcaatcttggctcactgcaccctccgcctcccgggttcaagcgattctcctgcctcagcctcctgagtagctgggactacaggcgcacaccaccacacccagctaattttttatttttagtagagatgggatttcaccatgttggccaggctggtctcaaactcctgacctcagttgatctgccagcctcaacctcccaaagtgctgggaatataggtgtgagccaccacacccggcctttttttttttttgagatggagttttgctcttgctgcccaggctggagtgcaatggcgtgatctcagctcactgcaacctccgcctcccaggttcaagcaattctcctgcctcagcctcctgagtagctgggattacaggtgcctgccaccacgcccagctaattattttgtatttttagtagagatggggtttcatcatgttggccaggctggtcttgaactcttgacctcactcaggtgatctgccctccttggcctcccaaagtgctgcgattacaggtgtaagccaccgtgcccagcctggaaattcttttttaaaaggcagagtagggccaggtgtggtggcttgcacttgtaatgccagctactcaggaggctgaggcaggaggattgcttgaggccaggagtttaaaaccagcctcggcaacatagcaagacccttaactctattttttttttttttaattagccaagcatggtggtgtacacatgtggtcctagctactcaggaggctgaaatgggaggactgcttgagcccagaagtttgaggctgcagtaagctatgatcatgctattgcattccagcttgggcaatacagcaagacactgtttctaaaaaataaaaaggcagagtaaggacattggctggtgtggacacaggagggatgagcctgtccagccccttcattttagggaggcttagagaacaaacagacacgtacagtgggagaggaagcagagaaagaggtcaaagctaagaggacgagaagcagtagctcccttggatccattgtggggccctcggcaggagccaggctgctggggtagcagaggtggtgagggtggaggatgcagacagagccccagcccctgaccctgctgtcttcagctccagttcctgcatctgtctatccccatcagctgctcggcctgcgttagtacctacctcttcagccttaggaagttctgcatgtccaactgcatctgctgggcggccggctccaccatctgtagaacagggcctgggaggctagagttggagtggcagccggggagggggttgcagggccttggaatgtgctgcttggaatgccatgtttccattatccatggttcctttaaagcagagattcttcctttactgtttgacgccattaacttagatgagagtctgatacatgctacacaccttctccccagacaaacacacacatagcctcctaaaaactaacctcaggttcaacactcaagctctcaacccatgccccgtgctccatctcaaagcccatgcccctcccctgtctttcaagctgcctggctcagctgcagccgccagagagccccttcccaggcacctgggtgtacctcctgccccctcacctcctggaactcctacctcttggggcccaggccccatccccctctcagacttctccagcctcatcttttttttctttgctctgttctttccaaggggggcagtggaatttatacaatatttaagcagccagagccgagtctgggaagatattattaatgtaaaagggacgggctgcaaatgcttttggacctggttacaattagagggtgatttttctaaaggtcaatgaattcagataatatccacaggggggagagaaatttaatacctttttagtgaattaattaattataatattatatcggcttggggttcttttccagagtgattaagggagctatctgtcttctgtgaggccggagaccggcgcctgccgccagcgaggaccctggcgcagggctcaggatggggggcccttccctctcctctcacccatgcagtggccaaggagctaggggcttgttaggcatgaaagaagacaggccggacctggtcagggctgagggtggtgcaggtattggcctttccccttggcctgtctcttccacccccgggtctggccctcctgccatggtggcctgaagagctgagatgtggggtatggcctccttctttacacttggagaaactaaggctcacgggcttcagggacatgccttagctccactgtgggttaggacagactgaggtggcagagctggctggaaataccgagaagacaagaaggacctccctaatacctcccaaaccaggccttctggaaaatctccaccagccagaggtctgtggagctgcctgggaagcttctccatctccaaaagaggctctttcagggtgtatagtgtgcccagcctctgcttataaaatgaaaatgccccaggagtattgatacctccagttgctgtgaggcctaagatttctgtccctggagggatctgaaagtggccagggagtggtgcttttcacccatttattcatttattcatactcagtcaaatgttcattcaacaaacatttgtggcacacctgctcttgtgccatcagagagacctaaatatcacctcttgagcccctgcccacttcatcttaagccccagctgctcatctaagcaatggagggtggggtggggagagctccgtggtccctttctgtccagacaacagtcctaactcaacctgaaggcgagaagactggctgggatgcggtgggtttgtggagcaaagtgggtgctcattcactcagcataccctgagcacccactttgagctggccctgtgctgggtgctggggatatgtgggtggataaaggccagctggtcctggtgacagagtgggcacagggaggcagatgtgagcctgcaatcatgattccgtgtgggttcagcaaaaggagtagaagtgacattaagctgggttgtgagggaccagactgacaaggggagagggaaggcgcatggaaggagagggaggggcattctaggcattggacacagagtgtgcaaaggcctgacaaaggggggtacctgcagattagaggagatggtgggacagtagatgaggccgagtgggcggccacctttgtccccacccacgggcccaggcatgttgacaggaagacaaggccataggtcgggtccaggaaggcagggagcagcaaagccaaatagacttgcttttcttcccttgtttttgaggcagggtctcgccctgttgccctggctggagagaagtggagtgatcatacctcattgcaacctcaaattcctgggctcaagggatcctcctgcctcagccttctgagtagctgggactacagacacacaccaccacacctggctagtttttgtattttttgtagagattaggtttcactatgttgcccaggtggtctcgaatttatgggctcaagccatcctcctgcctcaacctcccaaaatgttgggattccaggcgttagctggtgtattgcacgctgggcccagattgcatttaaacgttggctctgccatgacttgccatgtgatggagcctccctgtgcctcagtttccctatctgtaatgggagattgcaatgtctacctcctaaggatgttgtaggaattaaaggaacgactgaagggaagaagtcggccctgcatttagcacatgatgtggctccagatatcttagactgtacatggccctcgagagggtgggtgggtcagggccatgccttctattgtgcccgaaattcctctttcctctcaagggggtgccagcaaaggccctaccctggggacatttttttggggggaatatcaacattttcctcccctcatggctcagccccatctttccccactccctgcctctgtccctcttctcccttcatgcaacatcccctccaccctgactcccccgcagcagcctcctcccccaccctctcctctctctccatgtgcggcgggccggggagggcctttccattgtactatctttgggccctaaattaaaattgatgacatcttgaaatgagcagtgagggtaattttgcttctgagccgggatgctaatgaggccccttaatggtgcaaacgcggagctgacgggtcgtgtgtcacgcgccgcagcgaggggggtaatggccgcggtaagtgccggtaattacaccctgtcttgctgtattttggcaggcctggtgggagagtgggggctcaatcaccactggcgggggcaccccccacccagcacgggactgacagccagagatacccacttccacccagccaggcccctcgacttcagcctcacctagaatgaggggcctgggcacagcccccttgccccatgcacacatggcatgcaaaacacatagtcacacatgccacagtcagaccattgtgcacccccacccccactccacacataactccacagcctgggcactcccccggtatgcacaaagcacacgcatagacacacacacacatgcacactcacccgttatgctcccccatacacttctacactctgcagatacacactgctccatatacacagcctgcacagcacacacacatgcacgtgcacacaaatacattctcaaagagcacacacacgtggagcgcctactgtgctctatgagctctatgtctgccaactctactcccaactcttctgaaataggtgttattctcattttatgacacagaaactgagtcttgggagatttagcaacttgtataagatcacacagctaggcagtgacagagacaggactggaatccagctgtttttactttgcaacctttccagcccccatatttcctcctatgtatgcatgcatatacacctctcactgcacaaacacacgcatgcatgcacatgtgcacagtcatcacccacagatcacgtagatcctctgtgcacccaaagacgcatacaaaggcattgttcaaatacctacgcgttgctgacacacatatgcaaggtgtgcttggtgtgtacacacagatgtgcacttgtgtcacatggtgtttgcacccctcacacatggtgagcaggatatcatggagaaggaagcctagattcctacatggggaactaggcatatagcctctccaggcttcggcatctcaatctctaaagaaggggaaataaacactactccacttccctccccagcacttaactgttgttaaggcagaatgacagccacacaaaggactgtgacgtgccctcctacaaacccccggcagaatcacacactgggtgcacgtatatgcattgtatgagtgtgcatgcactgtccaagtggcgtctaagctctctgtacatacaacattgtatttagacacatctctgcacacacactgtacacatgctgtgaatacacatcacagcacctgtgcagtaccctaagcgtacctgccagtgaaactggaaaccccacaaagcccatgggtacttgtcatgtgtatatactacatcccttcctcctccccccgaaaagtatgtatcaattctatgattatggtagaggttaaaagtatagactttggcgtttgaccgcctgggctctgcatcactttatttgctgtgtgacctcaggcaaattacttaacctctctgtgcctcattgtcttcctctgttaaatggggataataagagtgcatctgcctcaagggatgctgtcagattaaatgagttgacagatgtaaagcacttagtgcctggcacgtagtaagccccagtgagtgttgtgataaggtgtacaactacaacaaaggaacatacctcggggtgtggcaagcaccaaggagcaggcagtggaaggcagaggagggaacactcatatacggctggggcagtcaaggagggcctcctgtaggaagagggattagggctgagccttgaaagactgtagtttcgtttgctgagttcctgctctgtgtcaggccctgtgctacgtgctttatatgaattatcccagtgagccttctgcgaaccctgggaggtgaccatggttatgtccatgttagagatgaggaggaaaaggtgcagagagactcggtaactcgtccaaggacaacaagggcctagataagagaaggagaagaggcacaggaattccaggcgggatgtgcagcttgtgttggaaatagagcaacagatgggaaacacacccagagggccttccttgctacactgtcatagtttccagttaatgagaagggggtgagcatctggagtgggggctgacctaattgctgtgtctcttgcagtgacaacagggacttgtggggggtgggagtggctggcactgcccacagcatgctcagggcaggggccagagctgggcatctgattcacctcccttgccccctcccccaccaagagccagggcctgacccagttcgggaagaggtgggtgctcccgcttaggccctggagaccaggcctggatccctggaaagggacctggacaggtgagaagcatggaggagttggtgaggggtcagtgagcaaatctctgcccactccaccctgaagccagcaccgctgcaccccagggctggttcctggagatgcctacatgaggaataagctgtgggccaggacactgaggctcccctcaaaccggccttaatatccctgttgcctcatgtccattaaactgtgcagggcctgacaagctcattcaccaccccttgaagagatcatagattttttcccctcagtgtttttcatgggctgttcctatttgtagtgcagttcttgacattcagcaaacagctccccacaaatagcctcctgtcccccaaccccacaaataacctctagccctcctcacccacacacccacccttttatcttgctggcatagagaaggtggggggctaggtggggaaggaggggaagggccatggcttccgaggcccgggacatgggttggcatcccacctcctccccttcctagtgtcggggcttggggaagtcctccacccttatctctgtgcctttgttttttcctctttggtcaggtggggacaacaaggcagcctcccaggctggggtgtctctggggttggtgtgaatcacatccagcaaagcacttggcccatgctggggtgggggtgttacccaaggagggatcacagcatttattgtccagatcaggagactctgaaagtggaaggggacattattaaagatcacaccagggcaacacatgacaactgggactgtcttgggagcagcaagatgagtgatcactggtctatgaggtgtctgtagcctttctgtccatcccgcctggtgggatgggctggggcgtctgtgtacacacatgtaatggctagggctgggccaccttggggaagcagaacaggctgggtgcggaggtgtatagagaggtgggagcagtctcaggagccggaggtgacatcctagacacaaggaaggtggagctgttgggagtggcccccaaggctagacagaggagaggaaatctgagggtgggagagtagggtggggggactcaaatctgcagacaggcttggaggtatgaacaacctccattccagatcacagtgacagccgccctcgtggagcacctgcttggcaaagaaggcactgctctgagtacttttcatgcatttgctcatccaatccccacaacaagcctatggagagggtactatccttgtctccattgtacagaggaggaaactgaggcacagaggggttgagtaactcgcccaacgccacactgctaggaaggaaagagctgaaatttgagcccaggcagcctgctcctgttccctgggggccctcc

SEQ ID NO: 226 - DNA, 2176 bp, Homo sapiens
cctggggctggggtgcggccctgggctccggcccctggaggagctgagcattccaggggcctccttccagggggctgccctctcgaagggagccagcgccggcagccaccatggcgtcacgcatagggttgcgcatgcagctcatgcgggagcaggcgcagcaggaggagcagcgggagcgcatgcagcaacaggctgtcatgcattacatgcagcagcagcagcagcagcaacagcagcagctcggagggccgcccaccccggccatcaatacccccgtccacttccagtcgccaccacctgtgcctggggaggtgttgaaggtgcagtcctacctggagaatcccacatcctaccatctgcagcagtcgcagcatcagaaggtgcgggagtacctgtccgagacctatgggaacaagtttgctgcccacatcagcccagcccagggctctccgaaacccccaccagccgcctccccaggggtgcgagctggacacgtgctgtcctcctccgctggcaacagtgctcccaatagccccatggccatgctgcacattggctccaaccctgagagggagttggatgatgtcattgacaacattatgcgtctggacgatgtccttggctacatcaatcctgaaatgcagatgcccaacacggtactcctggctaggctacccctgtccagcagccacctgaatgtgtacagcagcgacccccaggtcacagcctccctggtgggcgtcaccagcagctcctgccctgcggacctgacccagaagcgagagctcacagatgctgagagcagggccctggccaaggagcggcagaagaaagacaatcacaacttaattgaaaggagacgaaggttcaacatcaatgaccgcatcaaggagttgggaatgctgatccccaaggccaatgacctggacgtgcgctggaacaagggcaccatcctcaaggcctctgtggattacatccggaggatgcagaaggacctgcaaaagtccagggagctggagaaccactctcgccgcctggagatgaccaacaagcagctctggctccgtatccaggagctggagatgcaggctcgagtgcacggcctccctaccacctccccgtccggcatgaacatggctgagctggcccagcaggtggtgaagcaggagctgcctagcgaagagggcccaggggaggccctgatgctgggggctgaggtccctgaccctgagccactgccagctctgcccccgcaagccccgctgcccctgcccacccagccaccatccccattccatcacctggacttcagccacagcctgagctttgggggcagggaggacgagggtcccccgggctaccccgaacccctggcgccggggcatggctccccattccccagcctgtccaagaaggatctggacctcatgctcctggacgactcactgctaccgctggcctctgatccacttctgtccaccatgtcccccgaggcctccaaggccagcagccgccggagcagcttcagcatggaggagggcgatgtgctgtgaccctggctgcccctgtgccagggaacaggggccggcctgggggctgggagggccaggggcacctccctcccacccttcaggctgcactgtgtgtgaagtagccacctgccctgcctccctcctccccgttggcccctgtttggacttagtgcctgtctggcagcctgtggggtcaggagaagcacccccagggcagccctcttgactggcgcagtgggaagaggccttcagcccctctcccggagatggaatcgcggggcagggaggggcagggtgttctagaggtgagaagagggcctggtggagattccctgtcttctgagcccgagcccctcattaccagtgaaggacatgcttgaggggttcgggaagctcctcatctgaggcaactggtcctgggggtgctcaggcctgcctttttgggactcagatggcaggaggtccaccccgcagcctggtcctcggctctcccacaggtgggcaccccccactttggtgctaatagctctccaccaggtggtgtgagcgcgggggctgccagaagcgggaggggtcactgccggaagagcagctgccctccgacccctcactttgtgcctttagtaaacactgtgctttgt

SEQ ID NO: 227 - protein, 475 aa, Homo sapiens
MASRIGLRMQLMREQAQQEEQRERMQQQAVMHYMQQQQQQQQQQLGGPPTPAINTPVHFQSPPPVPGEVLKVQSYLENPTSYHLQQSQHQKVREYLSETYGNKFAAHPAQGSPKPPPADGVRAGHVLSSSAGNSAPNSPMAMLHIGSNPERELDDVIDNIMRLDDVLGYINPEMQMPNTVLLARLPLSSSHLNVYSSDPQVTASLVGVTSSSCPADLTQKRELTDAESRAKERQKKDNHNLIERRRRFNINDRIKELGMLIPKANDLDVRWNKGTILKASVDYIRRMQKDLQKSRELENHSRRLEMTNKQLWLRIQELEMQARVHGLPTTSPSGMNMAELAQQVVKQELPSEEGPGEALMLGAEVPDPEPLPALPPQAPLPLPTQPPSPFHHLDFSHSLSFGGREDEGPPGYPEPLAPGHGSPFPSLSKKDLDLMLLDDSLLPLASDPLLSTMSPEASKASSRRSSFSMEEGDVL

SEQ ID NO: 228 - DNA, 38920 bp, Mus musculus
  misc_feature (1)...(38920): n = A,T,C or G
ctaggaattttgtaactatcagggaaaaaaaaatacaagaaatctttgtgaagtccagaatgaactcccaaggtcatctaaccacaagttccctgagctcacagacctgagctgtctttctccttgcagtgtgtgctgttttgtatgcagaagaaactatgttgccagggaaaaacagaaagtagatttaagggtgctgagcattttttgttcagtgtcgtctttaaatttcttctgttcatttagattctttgatgtgtctgggtcttttcctcggatttatgtgaaattcttttagtattacttactagtagaatatatggtgggtgtgtgggggtatgtggtgtgtgnnnnnnnnnnnnnnnnnnnnnnnnnnnnnnnnnnnnnnnnnnnnnnnnnnnnnnnnnnnnnnnnnnnnnnnnnnnnnnnnnnnnnnnnnnnnnnnnnnnnnnnnnnnnnnnnnnnnnnnnnnnnnnnnnnnnnnnnnnnnnnnnnnnnnnnnnnnnnnnnnnnnnnnnnnnnnnnnnnnnnnnnnnnnnnnnnnnnnnnnnnnnnnnnnnnnnnnnnnnnnnnnnnnnnnnnnnnnnnnnnnnatctcatagatattctcagttttcttcattgtaggtaacaaatataaattcatccacaacacttgagccacaaaaaaatgtcagtgttgacactcctcagggtgccttggaccccaggattccacacacatttactcttatcaagatcatttggaaccatgtcatgaagagtcaggaatgatagaatatgggggtgggggatgttctggagcgatggctcagtggttgaacacacttgctgttctagtagaggatcagggttcagttcccagcaccatgatggctcacaaccatctgcaactccagtcccaagggatttgatgaggaaactgggcaggcaagtagtgtacatccatgcatgaaggcaaaacacttacatataagatagatagatagatagatagatagatagatagatagatagatagatagatagataatagatagatagatagatagatagatagataatagatagatgatagatagatgataggtagatagataatagatagatggatagatagatggataaatagatggatgaatagttagataatagatagatagatagatagatagatagatgatagatagatagatagatagatagatagtagatagatagatagatgatgatgatgatgatgatagatagatagatagatgatagatagatagatagatagatagataaatcgatcgatagatagtgtcccctatcactcttgacaggatgtttctggtctatactattgctttgctttgaaataaaactcctttgcttctttgcaatttgtttctgcctttattttagttttcttgaataaaagtctgggaacctggaaacaccagatccaagcaacgtctgctggttactactggttttgtcccagtaatgggtgcaagtatggacatttgagcctctcgtggccagcacacacatctggttctcccttcatggcagtttgatctcccagaaacatggggagaattgcctaagtcttttgaggtttggtcttttgctgtgtattgtagggctaagtgcaagcccctaagacctggttccctgagagaaagtctgagtgtagacccagtgactttgcacccaagttatttctcattggtaaataaagatgctgacaaccaatagttggacagaagagacataggtggggtttaggattccaggactgggggtctgaggaaaaccatgagggagaagaaggtgaaggagggagagagaagccatgggttctcgagggagaacctgagggctgaccaattggagttaagagcagcatagatgaaacatagtaaataataacttggggttattgataggaaggtagattctaatagcatagagggtaggtatctgcccagctcttgtgctgattaaggcttattgtaaatataaaggttgtgtgtcttttatccaggaactgaatgatcaaggtgatagagaaaccccagattgggattaaaaaatttcaacaacatatgtctggtaggaagaatggaaggatgctgctaacatgactcaacccgctctgcagcccccacagcagagcaagcaagcacctgcagcactggagacagggcgtggtcctaaggaaacgctacgtgtaaccagctgtcctcagccaccaggaataggacgtgtgttagtcacttttctcctcgctgtcacacaaaacctgacatgagcaacattcaggctgggtctcctcagttacacctcctgcaaatatcctttagctactgtggtggtctgaatgaagatggcccacataggcccatacggagtgccactaaagaggtgtggccttgttggagtgggtgtggctttgctggagggtgcgcgtcactagggggcgggtctgaggagctcaagctggggcttagtggctcaaggtctcttcctgatgccttcggatctggatatagaatgctctcctcctctcaagcaccaggtctgcctacacacggctgtgcttcccaccatgatgataatgaactaaacccctgaaactaagccagcccagagtatgttttccatcatgagagctgccatggtcatggggtctcttcacagcaagagaacccctgactcagacaggtatcttgttatatgagcctttaactttccccttagctgaacgggttttctttgcttgtttttctgtcttgtttcatttttatattcctaagatttatttagttatgagcgtttgcttgcatgtatgttttgttcactgtgtgtgtgtatgtggtgccattaaaagccagaagagggcatcagatccactggaactggaggtacaggcaattgtgagctgccatgtggatactgggaaccaaaccttggccctctacaagagtagcaagtgctctcagtggctgagccatctctctagacgtgtgtctttgaattgtttaaattacacttttatttagtggggggaggggtgtacttgcttgtcacctagcatataaatcctcagcatcccataagctcccggttaattggagtctccgttacttgcaggtgtgaggaggatcttgataggttagagaagaagaaacctatgtcttctacctgaactctttaaaaaaaaaaaaaaagacaagacccaaggctgaggagatggctcagtggttaggaacactggctgctcttccagtttcaattcccagcacccacatggcagctcgaaacagtctgtaattccaggggatctgacaccctcatatggacatacatgtaggcaaaacaccaacgaacataagataaataagtctnnnnnnnnnnnnnnnnnnnncccctacccacccactccccctttttggccctggcgttcccctgtactggggcatataaagtttgcaagtccaatgggcctctctttgcagtgatggccgaataggccatcttttgatacatatgcagctagagacaagagctccggggtactggttagttcatattgttgttccacctatagggttgcagttccctttagctccttgggtactttctctagctcctccattggtgttttgtttcatatttatatttttaagatttatttagttatgagcatttgcttgcatgtatgttttgttcactgtgtgtgtatgtggtgccattaaaagccagaagagggcatcagatccactggaactggaggtacaggcaattgtgagctgccatgtggatactgggaaccaaaccttggccctctacaagagtagcaagtgctctcagtggctgagccatctctctagacctgtgtctttgaattgtttaaattacacttttatttagtggggggaggggtgtacttgcttgtcacctagcatataaatcccagggagggaccaaactcaagtcatcagactttttagcaagttctcctacccactgagtcaactcagcatcccataagctctgggttaattggagtctctgttacttgcaggtatgaggaggatcttgataggttagagaaggagaaacctatgtcttctacctgaactcttaaaaaaaaaaaaaaaaagaagaagaagacccaaggctgaagagatggctcagtggttaggaacactggctgctcttccagtttcaattcccagcacccacatggcagcttgaaacagtctgtaattccaggggatctgacaccctcatatggacatacatgtaggcaaaacaccaatgaacataagataaataagtctttaaaaaaaatacagctctgacaacacctggattttcaccttcgagccccattcagacttccagaactaaagatgatagattggtgtatgtggcagggcatcgggttgccttgtcttgtcttgtctctcgggactggggattaaatcaaaggcattatgaataatagccaagtgttctatctctgagctatatcccctgcctttttgttttgttttgttttgttttgttttgttttttgttttttgagacagggtttctctgtgtagccctggctgtcctggaactcactctgtagaccaggctggcctcaaactcagaaatccgcctgcctctgcctcccaagtgctaggattaaaggcatcccctgccattttaaataaaaaaaatatacatttatctaatttgtttttttatttttgccccacggagtgagtttggaggtgagatgacgattgtgaggaatcagctctctctttccatcactgcggatcccagggaaggacgttaggtcgtcagctcagtgacaagcgtctgtacctctaatccatctcgaccctgccctttgcagtagccatgtctgtttgtcaacttgatgatacccggaatgagcaatcatccagaagtggaggacatacctatgggagatgactccgctggttttgtagtggatgaatctacttctagaccagctttgaggtgagatctggatcttgaggtgggaagacatacctttaacctgggccacaccctctgctggaagtctatggaagaggacgacataggaagctttcgttctttgcctgctcaccctcgcctctcgagcacatccatcccttcactggcgttagcgccgcctacttctgcgggattccggcagatacaggagatcagctgagacatccagccttgtggaccaagcaaccactggattcttgggctttatgttcatggtcaattgttgtttgattagctggacaacagcctctctctctctctctctctctctccatatatatatgtatatatatgagatagatagatagatagatagatagatagatagatagatagatagatagatagagaaaagtagatagacagagaggggggagagagattcattctataagttctgctctagagaaccgtgacgaatacaccttcttcttaaccttcttcttcttcttcttcttcttcttcttcttcttcttcttcttcttcttcttcttcttcttcttcttcttcttcttcttcttcttcttcttctttttctgagagatagtctcccatagttgctcaggcccttgggcttcctcttcagcacaaatagctttgaattttctctcctgtctcagcctccagtagctggattatagtctgttgccaccaggtctggcttactagcattattttgacaccactaattttgtgttatagcatcaatagaaaaaccagctgaatctagtcaatgaaaaacccaaaacaagacattagcataggtgccaccagcaatatctgcagaagaccacggactcggagtggagtccagcatctgctcagtacaccaagcgaatgtcgggaaagttcaaaggcaggacctgcaaatcattggctcctggagaccctgaaatggactgagcagctaactattatatctgtgtgtgtgtgtcagttctcttgctctgcagacaccttcagaattcagcgctggctgccgttcttagaacctgttctgttcttggagctgcgtcattgttgtattgttttctttgttcaactaaactctacttcctatgataggactaaggaattcttcctttcctcaacacaattatatcaataattaaatatgaaatgtgtggacccagctactaaataccagacttgtcagaccagatttgtttaaacttcagctatgtaccattcatgagagatattgttcagaggtaattccaccagagaatacacagagagtctgttttttaaaattaattttccatcttgttcactgccaccctcctggtcatcccctcccacaatccttttccccatcctctcaccccctcctcctctgagctagtggggaccccctgggtatccccctcacccaggcacatcaagtctctgtggggtttggcacaacctctcccactgaggccagacaaggcagcccagcagaagagcatatcccatgaacaggcaacagcttttgggacatcgcccgttccagttgttcaggacccacatgaaaaccaagttgcacatctgctacatatgttcagggaggcctaggtccagcccacacagttactcttaaagcacggtagaaggattgccagccagtgactgcaggggaactaactcaaatcatgaagcccaagatgctctgttcttgccctttatgcacagacatcacatcctggttgacacacttcacttagcaagaacagttagtgaaagtagaactatagaagccaaaaggcaaggttaggacatttagggacttccccagatcctgacagtccagactagatcttcaatggactagttctttggcagctgtgggggcctacgtgctgggctctgaagtcaaaatggtgccactcacatgttccgttgtgctcaggtctcaggtctagttcagtacacttaaaacagaacaacactaaacggctatgggaacccttatgcctgtagtctcggttaactggagtgtgacacgccacccccaattcagtgacctgcagtcgtagccatttcgcttgcataagggcagtgatttgaactacattcagacatcttccactggggcatctaagcagacttaatacagcaggcctctggccacagcctgcctgcagttcaacctctcatcctcaaggatgctatcccaggtttctgcacaagggggcagcagcgtgccagtggagatgctcagcaactacaaatcttccaagaaccagcctccgaaatcccaagttgttgattggaggtcagagggggttaaggacaccagaagaagatggtccgcagaatcaactaagcagggctcgtaggggctcacagagactgaaacggcgatcatggagcctgcatgagtctgtgcagggccctctgctcatatgttctgctggttagcttgggagtttgtggacttgtaccagggaaagttgggtgctttttgcctgcccctgggacccttttcctcggctgccttgtccagccttgataggcgggtttgtgtctggtcttattgcatcttgttaagccgtgttcagttgatatccctgggaggcccgccctttcctgaagggaaacaggagcagtggagctggggaagagggaaggcggtggtggggactgggaggagtggagggaaggaaaactgcggtctccatctactgtgtgagagaagaatagataaaaaggaaagaaaagttaaaaccaaacagaacgcacctgaaaagaaagaaaggaaaggaagaatacaaaattccttctttccagctggcctgaagtcggagacagtctcatgggactgagttctcatcccgtggggtctaatgctatagccatgcagaagggtcagaatgacgatgtcccccgccccccaccccaggcactgctgtagtgtgattgcctgtgtgttagtgggagaaataccccccacacttaggattacagaactggactgtgctgtgagagtactgtagaagactgtgggcgtggcctgtgtccctcccccccacccccaccgcactcccattcaccagtagagctcataaagcatttcttttattcatagaaatctatttgttcttaaatacttaatgaatgtatgaaaggaggtatatatatagagagagagagggagactgacagacagacagaccaacaggtctgagctgctgacacactagctcaatctgttgagggactaagggatcagctcgttatcaacagccatgttcagccaaacttagaggcatctaaaggtctccacgcaccgcccaatccaggggggtagagcaggaccgcaccagcagtgggaaggccttgatgggatcggagccctgagtagatgctgttttcctctgattccatggcacaaataagctcctgtatacggaggaaagaggtggcacctgggagcagcctgatgtttgatcttgattattaacttgatgggatttacaatcaccatggaaacgagcttcctgacacatctgtgagggagttgctagttaattgagctggggaggcccacactaactgtgggtggcgatagtctgtgagctgcctgcctttcaggctgagtaagaaggcgactgggagctgaacatcagcactggtcagcatccagcttgcctcctgcccgttgataccgtataacgggctgcctcaaactcccgtcgccatgacttccccctcaaactgggagccaaaattaacccctttttgttccagcaataggcaaagcagctaaatacaaacaggtacagtctggaaggaccaaggatcaatatctggaaggccccagtcaatcggggactgatcaatggcagaacacatgggtaagaggggaactgtattttcttaacactgaagtcatctgaataatgaggcttgcccgtggtaccctagaacagtgttttatcacatagtccaaagtagagggcatctctcacagtgattatacaaatgtatcttagtttgaatctagagtgttcatgtcctcaaattctatgtacagcctcacgtcgtttgattgcatcaattaaaatacagggtaactaccactctgtcctctgtaggaagtgtcagaacatctgctggtttgcaagcagcccctccccttggtgtgacttcttcaacttcttaactcctcccccttcctccccatttaacagcacctgaaacaagcctgacacataggtcataagtccctgcattgcctgggttttgtttacacccatttgactactggtagatgggaaacataaagaaggtttgagttatttaggtaccaaacaatgttctggaaggaaatgcttcaataaatacttagctgaaacatgccaagtgaataatcaaaaagataaagctgtagaaaggggcaagggtggtggagaggaaacaagaaggcccctgccaggtgggtgagatgcttgctgagagcctgtccaagtttggcttacaccagcagagcttttaattctgagaagaagagactgtcaggctgcagacaagcgagggtggccatgagagccacgagggagccactaggaattcttctattctgtagtctgtattctgggctcaaaggcctgagaccgtttcttctccctcgcactgacttctgtagttcactccctttcagttctcccaagaattgtgagtcctggagggtaggtggtccttgccctcccctcttcctcactacgtttcctgccccaaggcaaccttggctgaggagcctctagtctggcaggctctggggtgctttgaatgtgcttggcctggggagtggcactattaggaggtgtggccttgttggaggaagtgtgtcagtggggttggggaggactttgaggccctcctcctaactgcctagaagacagactgctcctgtcttcttttagaacaagctgtagacctctcagctccttctccagcaccatgcctgcctgggatgctgccatgcttcccaccatgatgataatggactgaacctctgaacctgtaagccagccccagttaaactttgtcctttataagaggtcttggtgtctcttcacagcaataaaaccctaaataagacagacacctaggaccatcttcacctgtaaaggtcttcacatgtgggtggcttaaaacatgcaagggtggggattgtaggtttatggtgacatccatctgtaatcctagtactgaggtagaaggatagagtttgaggctagcctgagctacatagcaacctgcccaacattctgggtcacaaagtgatttcttgtctcaaaaacaaaaaccaaataataaaatataaacaagacgtgtgaggggacagggacattctgaagctccatggcagagtttgcctagcaaactaaagaccctggttcaattcccagtggaggggtaaagagctcactcagaccagtcctggacacctcattcctgcccactactactaggcgccagggctgcctagctggaccaggcctcagctgcatctcaggtctagccaatcacatctgcaggactgggccagacctccgtgctccggaggagactggatgcagcgtgttcattgcctcctgtgacggcctctgtgtgctcctgttgccttcagtcctccttgtgctcaaagtctccgattttcaaacctttattctcccaacacaatgtttctttagagacagggcagaagaagaaacccgaaaagctgaaagcccagcgtcctgcatcttacatgggcccagtaggtaccagagtccagcttctaggtgttgggaggatgctggccatgtcccaggaggcgggtctgttcttgggctttgatccctgctccggcgggcccgcccgccctgtgtgcaggggcagtgtaagtagtctcagactctagagctgccccctcagggtggcaggggattgctcagctctttgacctctggtaacctaattaactaggtggccaacaggagactacgcagatcacaggtcgcagatcgcatcactccaacctcccgattacctggccaccacgttgtgggcagaagagtcctgcctgctggccatggaacgccgtgtgagagtgaagtcttgggtagaagagaatcgggcctcctttcagcctccggtttgcaacaagcttatgtgagtcgccagcacccggtgactacaacccaccctctttcttattcctcttccctcagctgtcccctccccctctagccttgcgttccatccacttggtgctcttctggggagggtgaaaacgacctgtttcttctttcactacctcagtatgttcctctttctggagaccacagacttgtggccatgacttctgagaccagcttgcgtgtctctgaggctgtgagagatgagctggcagggtgtgacattccttccgcggctgaaagcacctttccaacccactgcccccatgcaccttggggagagcctggtgttcaatgccccagactagaacttaaggcctggagacctagaaccaagcacctcaacccttggcaaaccccgaagctatggagtcagatgaacaattctttggatgagtggacttgaattcccaatcttcctgcttctatttcccaagtgccacaacaccctgtttctgaggtgctgagggaagaagtcagtgaatgctaggctcccacttttccaaacggagctgcatccctagtcctggggattcttaattcagggctcaaggccaagacacaaacaccagacccacccaagtctcctctaactacagcacagactgcctccgttcccctccccctcccctccctcagttccacagcagagcttcttgcaccacctccacagacccgaactccccgtgtctgtgtggctataagttatttccaatgggcagtgtcccaacccaaatggctccagacacttacaccccaatgggaagactagccaagtatatcacatcgtctccttgacttctcacatagccccccatgagttgggatttaataagtaactttcccaatgtcacagagctagagggggacagagtccatgagcaagcccaggaagagtttgactacaaagtccacgcatgctcttggtcactgcgcaatacccccgtagctaaccaggaacagccccnnnnnnnnnnnnnnnnnnnnccccccgagcctcctctcttctgccactgctgctttcctgtttggagctttaccatttttgtctctcttctccacgtcttccctgtctgctgtctctcattttcactcctcccagccttcctccctccaagcctgtgggcatttctctgattccgtccacatcagcctggttagaagcaactgcctgcccagcctccaggcctgcttacccccacgcccaccccacccccagcagactagcctctagaactcctcgagttcgccatcatgatcctagggcctccctttattcagtcagtcggtatttgctgtgcaccacgatgctccgacactgggcttacggcaggaggcaaactgaaaaaaaaaaaaaaaaaaaaacaccttccctgtagaattgttgagaggggacgccaatcagtatgaagtagcccatgtccctgagaggacagttttcatggcgagtctgtgccatgcctggccctagcttctctggtactttgctggtatcagtggtgttccttggtttcaacgcatgaacccagtgtccactttcgtcctcacagatgctctcccgctctgagtctccgcatccaaagtcccactcttaaaacctcacatactctgcattgagcaaaacataaagcagcagggactatccacccttccttgtcaggactcctgtttcctcaaggcatcctctctcaggttcacacccactctcatacgctatagctgtgtgatgtgacatatatagctcactccattataacttactatacccgcagcagccctgtttctgagtaagttcactctctgaggtcctgggggttaggactccaacacaagaatttggaccagtgtggggtattcaaaccgtaacagcccccactgaggcaagaatctcctggagggctccgagcacaggaggtacagggtctggcttgtgcattctggctggaggtcatacgtgggtatagttttcaaatgggcttactcaagaactttctgaatgtgttctaagtatatctcagtcaagtctattaataaaaaaccaaaaaaagaaaaaaatggctggagggatggaccaatgggcagggcacttgccatcacagacctgaagacctgaactgactcttaaaagttgtcctctgacctccacatgtactgcttataagagcctcactgaaagaagccagggcaggaacctggaggcaggagccatggagaagtgttgcttgctggcttgctctccatggcttgctcagtctactttcttacagaaccaaggaccaccagcctagggatggcaccatccacaatgagccaggtccttccccatcaatcaataaaaccatcagtctggctcataggccaatctggtgggggcattctcttaatttcccaaataacataaaagtatctaacatataaatacatttttaaaaaccnnnnnnnnnnnnnnnnnnnntggtgttccttggtttcaatgcatgaacccagtgtccactttcgtcctcacagatgctctcccgctctgagtctccgcatccaaagtcccactcttaaaacctcacatactctgcattgagcaaaacataaaacagcagggactatctacccttccttgtcaggactcctgtttcctcaaggcatcctctctcaggttcacacccactctcatacgctatagctgtgtgagcacaggaggtacagggtctggcttgtgcattgtggctggaggtcatacgtgggtatagttttcaaatgggcttactcaagaactttctgaatgtgttctaagtatatctcagtcaagtctattaataaaaaaccaaaaaaaaaaaaaaagaaaaagaaaaaaaatggctggagggatggaccaatgggcagggcacttgccatcacagacctgaagacctgaactgactcttaaaagttgtcctctgacctccacatgtactgcttataagagcctcactgaaagaagccagggcaggaacctggaggcaggagccatggagaagtgttgcttgctggcttgctctccatggcttgcgcagtctactttcttacagaaccaaggaccaccagcctagggatggcaccatccacaatgagccaggtccttccccatcaatcaataaaaccatcagtctggctcataggccaatctggtgggggcattctcttaatttcccaaataacataaaagtatctaacatataaatacatttttaaaaacccttgccaggcgtggtggcacatgcctttaatcccagtactcaggaggcagaggcaggcggatttctgagttcaaggccagcctggtctacaaagcgagttctaggacagccagggctatacagagaaaccctgtctcgaaaaaaaaaccaaaaaaaaaacccaaaaaccaaacaacaacaacaacaacaacaacaacaacaacaatcccttatggtaggtctggagaagactcggtggttaagatcacagactgctcttccagatgcacgggggcaggggaggcctgtggtatggggtggacatcaacaatgaggatatcactaacaatttccaggcctttgtgtgggagccagccttggttcgtatcaacgctctgacaacagcttctgaggctgcatgcttgccttattgtgtcagtgaatgagactatcaggaacccctcctcccccacgctgccccactgtagatgctccagcagctggccaggcagaggccaaggccgcttccactgagaggcagtctgcacacctccttgtgaggtgaggcgggggtggggtgagaaaatggttgatcatctgctgtgttctcactggaggttatttaaataaaacttaaggtaaaaaaaaaatcccttatgaaataaattaaagctgccttgctagacaaggaaactaaaccccagtaaagtcaaccaccatgcccaagattgcaataaagctgaatcagtcttgggaggtgttttgtgctttgaacacttgtcagacacacatctccttgccccattcctagatgtcacagtctcctgagtcccctgagtatggtccttagaggtgaagagtctcacagtagacaggctgagtcacccgagctcttgagcatggcccagggtcaccgagagccatgcttggctgtgttgtgtctttgttggtctgaagacatgcagacgatcaaacatggtgacacgttaatgcgtgcggaacaatgtgggtgggggagaccttctcctctcagatacatgtatcagacctcttcctgtccccacaggtccctgcttcccccatccttcccaggagctgactcgggttctcttcttgcctctccactgcaggcaccaggagcagctcaaaatcatgttcgttggaggccccaataccaggaaggattatcacattgaagagggtgaggaggtaggccaggctgctcactcttgtcacctgctgccacccggagggtagggggagtagacacttcctagacgagtcctagggctacagcgagtggcctggactcccatgggaagggaaaattgttgccttggaattggggttcctgccttgtgcctggggatcctgactaaggaggctgtaggctccccacctcatgcctacgtggtggtatctctccttcaacctgaatatgtgattgaccctcacaggagacacgaactctgagggactccatcatcctttgatcccagaatcaggttctccttctccttcacacaaggagcaaattgtctgaggacacaacaggtagaggagaaatggaggacggaaaggaaccggggaggtagagcatgggcagtgctgaagaaagagttgggactgggcgggcccccaactgctaggacttctatgacgcagagtctggagactgaattctgtacatttacacttgcttactgaagacacacaaacacacacacaggcacacgcacacacacacatacacacacatgcacacacacacacatgcacacgcacacacacacacgcacacacacacacacgcacacacacacacatgcacacgcacacactctcgcgtgtatcaaaaatttagtgtgatggtgcacatctgtattcctacactcaggagggaggcaaagagggtcaggagttcaaggagaactaggctgcaaatgaaaatatgtctggaaggaggaggaagaagaagtagaagaaagaggaggaggaggagaaaaggaggaaaagaaaaggaagagccgaccctcctgagcgacacagacactgtatatatcaggattgctgtgcgctaggcaaagactactgtgaattgtttcttgttttctggaagacctggttctagggtttgggcctccacccctctcgctgacattcccaacacaaacttaagaccgctcaccatgaagccttgagaattgctctgccggcaaatactaagggcaacagagcagcaggcagaggataacaggcctgcagcaacggtctgggctgagcacaaccagttccacacaccttgaccttctcctggccgtcgaacacctccctcaaaatgggtttcctgtgatggaaaaatgatatgaaaatctaaagtacagagagagagagagagagagagagagagagagagagagagagagagaggttagagctgagtggctgtggtgactgaggcccaggtggcctttactgattggcaagcagactcatccccactcaacaattaggcctgctgtcagtgtccaccctgcctggcccccattgcctagctccttcttctctgcccttgctcatctcagggtctctctgtgctgctccggagcatatgtctgttccaactggtttttatgtcagcttgacacgagttagagttatgggagaggagggagcctcaattgaaagagtgcctccataagatctggaaagctggcccagcccactgtgggcagtgccatccctaggctggtggttctgggttctataagaaagcaggctgagcaagccgtgggaagcaagccagtgagcagcacccgtccatggcctctgcatcagctcctgcctccaggttccttgcctgttatgaaaacattgataactctaagtaaaaccatgcccatgagtcctgagccagtacatactgcaattcagctgggggctaagagatgagctgggctggctttgatgaggagcgatacttggtagctcagagaagtctggctataggtaggtttgtgatatttggatccactttttagtaggaaggcagagtttggtcttcctgagtccctgggcagcctcgagcaaaacaaagtgtcagtatcctctttgtccttgcctgtcctgacgcagagcctgagcagttactctgagtgatgtttaaagcgtatctggcactgactacactggatttcacatctggctgaactctggcctctgtgatagcctttaggtgccctgaaccaactcaccactcaaacccactttttctggtggttgccaagaatgaaggcaattgactgagaaggagaagttcctctggctagtcatatgactagacaggtccatatcccatacccttggtctgagccttttctcgtaccacatgggaccatagctccgcctgtggaaaagacaatgtgtacagaataggtacttcatagctgtgggtccctacctattgctggctcccctacctgtgagtcctttccaggtcacagaagccagactcaatttaatatctgtgtgaacagtacacttaatcttccagctagccctaggtctcaaacatcatttccttcccatgaaacataattcctttcggattgcctggggttattgatgatcttctactctgctgtcaggggtatgtccgctgctgcaggccaagcctgcccctcatcagagaggaagtctctgggcaatcccactgctgccttctagttttgatcaatggctgttaatatcttttgtttgtttgtttgtttgtttgttttgttttgttttgtttttgagacagggtttctctgtattgctctggctgtcctggaactcattttgtagaccaggctggcctcgaactgaactcagaaatctgcctgcccctgcctccagagtgctgggattaaaggtgtgcgccaccacgcccagctaagattttttatgggggtgagggggctgttaatatcttgttgtcagcctggaaatggtttgaatctggccccttcctcccatgttgatatttgcagcccctcctcgtaactccgaggtccctcctctaccattccaccatgaaaggactcaagacttatactgaggagtggtcacacacacacagacacagacacacacacacagacacacacacactcaattgtttcctatgaagaaatctactaggttttcttggtttgtattaaataacatataaagtgcgtgtgcgtgtgcgtgtgcgtgtgcgtgtgtgtgttttctagattaggctcagaacctcatacatactacataatgaacatcctgatgtgacgctgcatcttcaatcatacggcttgtttttaataatgaacgtaaacaccattcattgtagaaaacataggaagtatagccagctttccctcatagccatgaactctgccacctatgctatatatggactactctgtaattaggatcctctgtgaataatttctcttcttcttcttcttcttcttcttcttcttcttcttcttcttcttcttcttcttcttcttcttcttctccttctccttctccttctccttctcctccttctccttctccttctccttctccttctccttctccttctccttctccttctccttctccttctccttctccttctcnnnnnnnnnnnnnnnnnnnnctcctcctcctcctcctcctcctcctcctcctcctcctcctcctccttcttcttcttcttcttcttcttcttcttcaacaagatctcactccatagcccagactggcctcaaactcaaggcaatcttcctatcaactagagacataagtcatatgcccagctcataaggtactggttaggattttaggaaagaatagaatatttagtaggagccccctagagagagcccagtcactaagtccatccacctaggcagtcaactgccacagcccagtgccagagcacctcagtagctggagggatgtgcagggccccagagctccccaggccaggatcccaactgcagctccaagattcaccagcatagacaagctgctctgagcctcagcgtccttttcttctcagaatcaggccaatgatgctaacgctaacgatgctgatgctaacgatgctgatgctgggcttgtaagattcccgatgtgcatgagaaaggccagcctgagttaaggaatatctccactgctgtgtcgctgggttctttggcaagcttcttacccagcatccttcctccctgccaggcacctgctgcaccctgaggatcccctactagttccagatttgcatatagacccctgtacatctccaactttcttgtctgtggcctgggccagggggtccaagggtttcagagcaggggtgctggggctattcataagccccgaggccttcgggaagctattccggttttccggtcagagttcaggtcctgggtagaagttaaggatctaagaggcagagcagggaggtctcaggtccttggttttcccacaggtgttttaccagctggagggagacatgatactacgagtcctggagcaggggcaacaccgggacgtgcctatacggcagggagaggtgaggctgaccccaaagaaagcagagggtggccgagcagaaacccacccctggtcattttccctgcccatcctcagggctcccccttcctgagcacagctcaacattccctctgttttcctatagtcttaggatagaggctggcagagtgtaggctccagggtggacatgtcaccttgaggggttgtagcctcgctggtctcctgttctctactcctgcagatattcctcctgcctgccagggtgccccactccccgcagaggtttgccaacaccatggggctggtgattgagagaaggcggctggagagcgagctggatgggctgaggtaattgctcgtgtgtggtgggggcttgggccatcaaagagctaacaacagagggcatcattcaaaagtatagcttgaaggatcgatgatagactcaagaaagtacttcctggccactaagagactagaggacttggcaacaggaggcgatggagaccctgggtttgctgactgaccagagaggggagagtggcttggatgaggaggggagggagtggtctctgcagtgcacatgaagaagcagaagcatgcttttgtgcattctgcaggtctgctaggacccttgtggtggcgaggggtgactacagacagggagactagaggaacccaaaagccacatgtcctggtatgggcaaatactgcggctgctagcagcctgggcctacagaaattgcccttggcttatgtacttgtgtttctaccccagatcataacaagcatggacatctggccagcaacatctgtgttccaggcgccagctaggagttgctgtgtgtgtttgttatcctattctcacccgtgatactggctagggctgggtgaactactggtcctagcagtttttgaaactctggggactggacccagcacattgcacatgctagagctatgctctgtcagttactggagcagaaccgaggcccaggtaaagaaactcgctagatgaggcattacagagacgtgcagagccagcgggtgctggatcagcaagggggaaggaccagccctggagggctccccttccccatcagtgtctagatcagcagttctcaccctttcccaagggccgcctaggaccataggaaacatttaccctacaattcataacagtaggaaaattccggtcatgaagtagcaacaacataattttatggctggggggtggggggtcaccacagcatgaggcactgtgttaaagacttacagcgttaggaaggctgagaaccactgaactagactattaagctctgaaaggaggaagtcctcgaagcccccaaaccaaagatttttcttcaagtgtgctttgagttttcaaagaaaactttaaatttctcaataaattaccagaatcaaaattctttgccggacaccttctgtgatactgggcatatttaaacactttctctcttttttttttaaagatttatttatttattatatgtaagtacactgtagctgtcttcagacacttcagaagagggcatcagatcctgttacagatggttgtgagccaccatgtggttgctgggatttgaacttcggaccttcggaagagcagtcgggtgctcttacccactgagccatctcaccagccccctttttttttttttttttttaaatgagtcaaaatcatacacattccctctcaaagtctggaaacatgagaatccgaagtgaactaaattaaaattacctgccacttaagggaggattttatggtttgtgaatttaattttattcctcccatgcctcccgagcaaacacataattaaaacgcagaaacaaaagtcctttgtcgggctccagttagacacgaaggcatggcctttttcgttcatacctcccctcacaaccctccagtcttgttacatgcatgnnnnnnnnnnnnnnnnnnnncacattgcacatgctagagctatgctctgtcagttactggagcagaaccgaggcccaggtaaagaaactcgctagatgaggcattacagagacgtgcagagccagcaggtgctggatcagcaagggggaaggaccagccctggagggctccccttccccatcagtgtctagatcagcagttctcaccctttcccaagggccgcctaggaccataggaaacatttaccctacaattcataacagtaggaaaattccggtcatgaagtagcaacaacataattttatggctggggggtgggggggtcgccacagcatgaggcactgtgttaaaggcttacagcgttaggaaggctgagaaccactgaactagactattaagctctgaaaggaagaagtcctcgaagcccccaaaccaaagatttttcttcgagtgtgctttgagttttcaaagaaaactttaaatttctcaataaattaccagaatcaaaattctttgccacacaccttctgtgatactgggcatatttaaacactcttttttttttttttaatgagtcaaaatcatacacattccctctcgaagtctggaaacatgagaatccgaagtgaactaaattaaaattacctgccacttaagggaggattttatggtttgtgaatttaattttattcctcccgtgcctcccgagcaaacgcataattaaaacgcagaaacaaaagtcctttgtcgggctccagttagacacgaaggtgtggcctttttcgttcatacctccccctcgcaaccctccagtcttgttacatgcatggttttaagttttgctgtctttagttttaaaaaaataataataatgctggagccaacgagccctctcagtggaaaggcgctgcactggctgccaagcccgagggcctgagtttgaacctggaatccacaaggcggaaggcataaacttgaaaattaccttctgatctccacaacccagatgatggcactcacaccagctccccatgtaagaaaaaacataactgtgaggtactctagacgctacaatttacccagtttacataacggaagtcacatgcccactggaaaattcacaagtatttctcatactgttaaaaattccatctgtgtgtgtgtgctgctgacggctgccccagtccatggtaatggcctgttgaataggcagatagtgggacttaacttttcataggagtctctctgaggtgctttttggaggagactctagtgagttattggtgccctcagtaacattttacagcaaattcaataacggattcatctggctgcttttgacctttaataaaaggcaggaactcggcattaaaatgccgccccgaagaccattcctgagggcacggcagccccatataatgaagctttctggtagccagctccgcctcaggttaggagccgaatggctgcatgatttgtctgcagcctctgtctccagagaactgcccctgcctttctggtgagagtcaggtgagcagaaagaaatgggctgatctgaaactgatgcagggattaggccttctggtgacagttgttcccagcacctgccttgcgtaagggtcagaggtgcctccagttgtgtaagggtcagaggtgcctccggttgtgtaagggtcagagatgcagcacagctctgcctgtccaggtgctctctgcccgtggggacatgggtggcaagggtgactgaaggctgtgtgtgccagagaaagccagagatgtactcaagttctaagcagcagatgtgacctcccacctccaaaacagaagagtccctcatgggggtgggaggtgtagggggtcagggagtgggaggtggggtgggggtggggataagggattgggggtgtgtgctgcactggctgctgacgtttctttttttttttagatttatttatttattatatgtaagtacactgttgggcgtcagatctcgttacggatggttgtgagccaccatgtggttgctgggatttgaactccggacctttggaagagcagtcgggtgctcttacccactgagccatctcaccagcccgctgctgacgtttctgttacagtgacccagagcccaaagaacagacagtagcccttccggctgcccgtccaagattcaggctgagcttcaacttctttttgctgaaaacaaatccacttggattgaatgttctccagtgctctcccagcttctgtcttgagtgtagcttgctccaccacatacataggctgtgtaacccctgccgagtcattctgtttccgagctcaagttctacctgggttgcacacacccggcgttaaatgtgatcctaggctgtgccaacagaaagtaacaaacacggcttagctatgcagtgcctggactcagcaggaggccttcaagcagagcccagcctgaaccaggctgccccaaagctgcccagatggagagtgggctcccttgacctctgttttcacaggtattacgtgggggacactgaggatgtcctctttgagaaatggttccactgtaaggaccttggcacgcagttagcacccatcatccaagagtaagttcccattatgggcccctccctcaatgccccatggcctggagccatcaggggtgggagtttaaaagaatctcccacctccaggatgggacgagccactctgcagggtcgggaggggaagcacgatgaagtcctgtgaggggctatgaacgtgggctggctcctgcgtagggtatatacctcaccagcatcttaacagaaatgctgtcgttccgtcctctcgcctggtccctgcaggttcttccactctgagcaataccgaacaggaaaacccaaccctggtgagccccctcgcttttctccctccctctttctctctagtgggatgggtcttgacgtggtcccaggagcctcttcctgaatcctctgcctagtaattaaagtactgagcagacaacaccaagtagcaacctgtatgcctgccaagtcattcggctgcacccaaatcccgaactggccttgagttaaggcttctgggtcccggctatactggggctgggtggcctgagcctgaaggtcactctccatcactgtgtcactggcgcagaccagctgctcaaggagctgccattcccgctgaatacacggtccatcatgaagcccatgtcattgaaggcctggctggatggccactccagggagcttcaggcaggcacatccctaagcctgtttggggacagctatgagacccaggtaatacagctcagggcactcaacagccagccagccagcacctgagaaatgggaatcaatatctctctctgtctctctctgtctctctctgtctctctctgtctctctctctctgtctctctctctctctctctcacacacacacacccacacacacacacacacacacacacacacacagagaaacttcagaggcatgagaacggccttcctgttccctctctatctccgagattaacagtgttgctgtgactgaagttctctgggtgccttcatggtcgcaaggatgctttgtgtacagagtgggaggttctatgtccactgtcaccttcctgggaatcgcttacctcccctgggcttttgtcacgtgggaacttggaagctgaagagggagctatttggcagaggctgggcagcaatgtgttagagaacatacaagctggcctttcatctagaattcctgctgctctaggctttggtaagaacaagacagttgctatggacaaattaacccacaactgccagtcacgtgacagctcatttactagagaaaaacagaaagtcataggagaataactggaggaggtcatgtgcacctagaatgtttgattaaaaattttagatttgtttattttattttgtgcttatcggtgttggcccgcatatgcgtacatcatgtgcttgcctggtgcccgtggaggccagaagagggcgttagaccctctggaactggggtcacagatgcgtatgaatgtactgggaactgagtctggggtctctgtgatcttcaccacttagccatctctccggccctgggtagaattgtaaagctagtgtaagggtttgcaggagggaggtggagggagtggtttggaggaggaagaaacataaaggtcagaagaactgaaacagcctagccctgtaagcagccgaggctggccagagctaggtgggaaggctagcaaggaggctggactgctagctgcttccagaactctgctgcactagactaagggaggggccatgtcctagagacatcggggcttcgcccacatgttgggggagaagtctagagtgaatttcagagccatcagcctttcattgtgatgttgggccagagaacacctacaaggatgctgctattcgcatgtgtgatgggtttccaatggcacagcctgtcaccaggagtcagcgagatggctcattgggtcaaggtgctatcttagggttttattgctgtgagcagacaccatggccaatgcaagtcttataaaggacatttacctgggggctggcttacacgttcagagcttcagtccattaccatcaaggcagaaacatggcaacatccaggcatgatgcaggcagagctgagagttctaggttgctagcagaatactggctttcaggcagctaggatgagggtcttaagcctacgcccatagtgatgcacctactccaacaaggccacacatcctaatggtgccactccctgggccaagcagagacaaactatcagagatgcttactgtataagcctggcaatccaggtttgatcactgagacccacaaaaacgtggaaagagagctgatgccacaagtcatgcatgtatgaccacatgtacacacatcatacattcacatataatgatgatggtaatgatgaagataatcatgatgatgaaaaagaagatgaaaaggaaggagaagaaggaagaggaggaggaggacaacaacagcaacaagaagaacaagaaggaggaggaagaagaggaggaggagaagaagaagagggaagagggcaaggaagaggaggaggaagacttaaaagttaaacagtggtcactccagggcaggaggctggcagaacacaggtttagactgctcttccagtactagggacgcccaaagctccacccaccacagccgtagctaatggcttcttcctactctgtgtctacctgctctagctctcctttgccaattgccattaacccctccttacagcctgcaggagcgcaggctctcgctaatcataaggccagcaggccccagcctcatgttctccccagtcagacgttgaacacttcacaggaagggcagtggaaatctgggggcccgggttgggtgtgtctgagtgtgagctggtgacacccatgagggcgtgtgtgtgtgtgtgtgtgtgtgtgtgtgtgtgtgtgtgatccctttctgatccctgacgagtaggctcgtcacatggggaggaggctgtggaagtgggcacatcttgtccctcgaaggtgataatggttaagggccagggttgtgactatttcccaaatggagcagaatcccaaaacgctctgctttgtcttccccaggtcattgcccacggacaaggtagcagcaaaggcccaaggcaggatgtggatgtgtggctgtggcaacaggcaagtgggatcccaggtttgggtggcaccatttcctgtccatgggggttggtttgtccctggacctcaggctcccatagtgagagttactctcagggccttcttgcgaggcagactcggggacatgaaagcgagagttgaggcctgatgtgcccccagcctcttctgtggttttgtagtgttggggatggaacttatggcctccttataagagctctaccattgaacaccccctgcttccccgttcccacacccaccatgcatgtactcatgtatgtgcacacacacacacacacacacacacacacacacacacacacacttttcttatttcaatgcagggttttgctaattcactcaggctggccttgagctcagcctcatcagccttcacttggttctgctgttctctcacaggagggctcctctaaggtgacaatgggagggcagtgtatagccctggccccagatgacagcctgctggtgcctgctggaacctcgtgagtatatgccaggactttctgaagccatgacaatgatgcccttttccctggaacccttgggctctggccttgcctgactcttatgtatctgtgtccccacaggtatgtgtgggagcgagcacaaggctctgtggccttgtctgtgacacaagaccctgcccgtaagaagccatggtggtgaccctcctgtgtgcgccccaagcagccacagggtgcctgagtaatgacctggtagctgcccatttccagacagctctttcagcctcattgcatctccatggacatcagcaggccccttgagtggttgagagctgtcactggcatcaaccctcctgcctagctcagcccaggatgccagactcctaggacatcagcagtccccgatcttctaacagccatagccctacactgtccccatgtgcccagcagcctgacactaagaaatctctcaataaaggcatcctgctgaatgagtgcttgcgagttttaggtggcagacctgtgttcccctgtcatgtgttacttggggacaacagttgccacagggagttagaaggcctgttaatgtgtgtcatcacctcttgtggataggtggttccctgtgcatgcaaccctgatccacacccgctccgcatcctgcttataaagccgcgtgcttctttgtctctccctctgttccctgttcattcatttagttgttaacatacttaaaaataacaacaaacccccactctgctgagtttctttctcaaccacagaagttatgttatgctaattatggaaaacagaaatacctcaaacacagagttccccacccccagaggtaaccactgtcatagcttctacaagtggaggaaaggcaagtgggacatctgtagctcagagaaggacttcagcaagaggcctgtagcactaagcctgcatctgcacagagcaggccttcctgggcagcctgggctcagggagggacttcagtgagaagctgacaatactgagcctgcatctgcacagaacaaacctaggcttagaggcagagcttcaagaaaagggaactagagcccagtctccctgccctagcctggtggctcactgctctgacacactccacagaaggtcaaaggggacctgacttggctgagggagctttctggccttgaaggatatgacatcagcaccttcctatcccaaagcttttctataagcaaagaaggaccacactggtgccttcaaatgtccactgtccagggtggcctggtccgtgcttggtggcaccagtgtgtttctctgtcccagatctgggaagagaacatgccatgtctagagatgctggggggggggggggtgtcagaacacagaaggaatggctccatctgtcaggaaaggacaaccaggcttcctcattttctcttcaatgctctccacaaaggtgacaataacacctgattttacagaggacaattttcttaacatttaaaatatgccccccaccaccccccagccatagcgagaaagctgtaaatcccagcagctgccatttgaggtaggccagacatgtagctgaatggcagaaggggaaacgggacgtgcttcagagacacgtgaggaagcctgggcttctgagaaggttgattagaacagtggtagcgagaggacgggagagccgtgcttccctgaagaaaagacttaacagagcaattgggcctcaactccacaggcaaccgcagcacagatgggaattctgggaaggaaatggcactgcgtcatcaatggaaaacgcgtccctccaatccccttaacatggcttaacaaacatctacctccctagccacgttagccaaggagttgattgcccttcccagctagaatgctaggtctcccccaagtcagagagtgcattttcttgaccagaaggaaatagtttcccctaaatgggcgttactgctactgtgacgctgatgatcagggtgcctcggtgggggcctctgctctccagggctctgggtctttcacatgggatcgaattccctctccatagtcccctggggtgggggtcaatccatgttagacatgtttgaatcacacaggtctcagggtcagagccaggcagaggcccaagagagagacattgtggagtggaaaacaggggaaagcaggcaggatggaggccagacaagagacaatggatgcacgtattttgaaaccagtgtgcatggtgcctctacccacttcccactttctgaaaactcaccagtgatctcagaggaaagccagatggcaggaagggctgtgggtcccctgcccagcctccaggtcacccctgtctgtccctggctgcctttctgtctgcactgccttctcctgcacctgccccctcccttggctttcactgtggcttttccatcccaggagtatctctaccagggagcaggaggccaagcccgggccagccagcctcagtcagatcaaacgcttccaagtcggctgcctctcccattacggaattgctgacaccaccaccagtggattcacgccactgtcactgtcactgctggctacccagagtgcctgtcttccaggagtctacccaggtgtgtactctacaggattagagcagccctggtgctgcaggggaccacatgtcaccatctccatccccttcttctggagacctttctgtcaacacatctacaattagccggctgctccaattcaaactaacatgagggaaatgtctggatgcccttcactgctgcacagccatttttgcctaccttggacaggcatgagctgtccttatccagctcctaaccagccttggaatttccctgtggttctggctatactctctgtctccattgagcttgccagtcccactgccacctgccccaacttccccaggcctgacttctctaaaggacccctaccccccctgaggctggacgttaggctgccactacactccccagggaaaggagggctcccttggtctggctcagtgtacctttctttggacttgctcttccatttaaggaatggaaaccatgactcttgacccttgccagctacaggagagaagatggaacatgagaggactgaggagggacgtacatacggggaacgggaagggggcacgtgagaggggagaggaagaagggggaacactccctttgtacaatgaggagagcagtggtgaggggtgtgaggtaaagtggagatgttggggctctggtccacacgatgcaaatgtagaccagcactctgtagcttctctttctttctcccagcgtaagctgttcctatccagggtacgatgtagcgtcatccattgctttccgtgtgagggggcgagtggaactggtaagtggtaagcgagggcccaacagtcactaatgcttaccaagcgcaccctaccacacacacacaggccacacaaaggtgaaggcggagagctctccttgacctcgggctgtgattcctggccaaggcctggacacagaccatagcaacgagcacagaggtcgcaggcaccggtgggctaagcagggataatggctggtggtaggtaggcagtggctcaggaccattctgggggacaatcaggtttacagggcaggaggtcaagcctcggtgcatggtgtggaaagtctccagggaaacaagacacgggagtgtcctcaaactggaacaggaaggcaggggtaatggtaatgggtgagattcttagtaagagagcaaagtggaccatgatccgcctcttaaaagtccctgtgggtagggggcacacaaaaagaaagatccagaaaaaaaggctcagaaggaagttttaaatagaaggctcgggtatttgcaaggaaagaagaatgtaagggaaggcagtctctttgcccaagtaaagctctggatttccattagaaaagatggactaaaaccaccatttgttggcaagagcagaacattttcaacagtgcctgctaactgcctgcctcgggaaagccagtccgcagagccaagcacacaagcagccctgctgtgtccggcatctggggtggacaccccaattccacaatgccctgaccagcactatatttttaaaaaagnnnnnnnnnnnnnnnnnnnngaaaggatttaagggagggagggaggaaggtagggagggagggagggagggaaagagagagagagagagagagagagacaaaaaaaaagaaagagagaaagaagaaagaaagaaagaaagaaagaaagaaagaaagaaagaaagaaagaaagaaagaaagaaagaaagaaaaggttttcaggatataagttttaaggtaggggaggtggcacatgaccataatcccagcacccaggaaggtgaaggcttcaaggccaacctgtggggagaggcagctaggaatgatgtctaagtgtgtctcgaaatagatgatagggagggtgggggaggggaggtgaccacagctctgagtgctcaagccacgcagactggatgacagatttttggtactttagacagccattagtgactttattgatagcaagttctcagagtggttgggccagaggagagggaaaccataaagctctataatgggttgaggcactaatgaggttggaagtaatggagacacacttctcctccttttcagttgttttgccaggagagggagacaaggtgcagtacgcagaggactgaggtttgggtggtttcagggttctgtcatcttgtggacaaaaaaaaaaaaaaaaaaaaaaaatcaaatatagtttcaggaggagggagaggagagaacagaggtagggannnnnnnnnnnnnnnnnnnnnnnnnnnnnnnnnnnnnnnnnnnnnnnnnnnnnnnnnnnnnnnnnnnnnnnnnnnnnnnnnnnnnnnnnnnnnnnnnnnnnnnnnnnnnnnnnnnnnnnnnnnnnnnnnnnnnnnnnnnnnnnnnnnnnnnnnnnnnnnnnnnnnnnnnnnnnnnnnnnnnnnnnnnnnnnnnnnnnnnnnnnnnnnnnnnnnnnnnnnnnnnnnnnnnnnnnnnnnnnnnnnnnnnnnnnnnnnnnnnnnnnnnnnnnnnnnnnnnnnnnnnnnnnnnnnnnnnnnnnnnnnnnnnnnnnnnnnnnnnnnnnnnnnnnnnnnnnnnnnnnnnnnnnnnnnnnnnnnnnnnnnnnnnnnnnnnnnnnnnnnnnnnnnnnnnnnnnnnnnnnnnnnnnnnnnnnnnnnnnnnnnnnnnnnnnnnnnnnnnnnnnnnnnnnnnnnnnnnnnnnnnnnnnnnnnnnnnnnnnnnnnnnnnnnnnnnnnnnnnnnnnnnnnnnnnnnnnnnnnnnnnnnnnnnnnnnnnnnnnnnnnnnnnnnnnnnnnnnnnnnnnnnnnnnnnnnnnnnnnnnnnnnnnnnnnnnnnnnnnnnnnnnnnnnnnnnnnnnnnnnnnnnnnnnnnnnnnnnnnnnnnnnnnnnnnnnnnnnnnnnnnnnnnnnnnnnnnnnnnnnnnnnnnnnnnnnnnnnnnnnnnnnnnnnnnnnnnnnnnnnnnnnnnnnnnnnnnnnnnnnnnnnnnnnnnnnnnnnnnnnnnnnnnnnnnnnnnnnnnnnnnnnnnnnnnnnnnnnnnnnnnnnnnnnnnnnnnnnnnnnnnnnnnnnnnnnnnnnnnnnnnnnnnnnnnnnnnnnnnnnnnnnnnnnnnnnnnnnnnnnnnnnnnnnnnnnnnnnnnnnnnnnnnnnnnnnnnnnnnnnnnnnnnnnnnnnnnnnnnnnnnnnnnnnnnnnnnnnnnnnnnnnnnnnnnnnnnnnnnnnnnnnnnnnnnnnnnnnnnnnnnnnnnnnnnnnnnnnnnnnnnnnnnnnnnnnnnnnnnnnnnnnnnnnnnnnnnnnnnnnnnnnnnnnnnnnnnnnnnnnnnnnnntaagtgatagtctggcttgagtctgggatactcaactgtaaactaaagggagtgggtgggtgtgtgaatccagcctgtctacagcaggaaggggtgtgttttagagagatggggattcatgcttgctataaacctggtcagaagctgtgtctgggccagggtgtcacaagctttagagcagatgctattacagttgtcttggtaaatggttgtgcgtgttatcacattaccttctagatattttgaagtggaaatttctgggtttttttttttttttttttttttggaaactcagttatgttttgtgaggcagatacacaggtgagagaatgtgttgctgaagcagacacaggtgagaggatgtgtgatgtttaggaagactataactatgaccccacagacagtgggaggaggctctggcattggttcactagtcttcgctgaggaggctcttgtattagcttaccttacatcgtgttgctcatcttcgcctgtcatgactttgtagagagtaactcagccaaggacttgtgatattcctgtggcttcttgctgcttccgaggacttgggctgattggctggtggaaccccgtggcttcttccaaacccaactgccattgctgattcgtgactggtgattgccgaatggactggactgctgctgctgctttgtgttggtgtttgctacaggactggactgctgacaacggatattggaatagcccccaaaactaaacaggtccacaacccccgttccctaattaacctttctcttccattacctctggtgggtggtggactagaacccttattaaaataggtttttgagaagtctaagccaataatatttattgttacatccatagatttgtgtggccgtcatcagccttgctcaggggagcttctttttgcagtgggtaatacaaaggtgcagaactcactggccagaatgctgaggaaaagtgattgtgtattgtcctaagtaggacatggcaatgtattacaagtgtgtaagggcagtgggtggggaggagcactgtgaaatggcatcatttggacaacatggccactgtacacatgaattcacagtgtttgtggttacttacacaaggccaaagctccagtatgggtagggtcaagaggctcaccatgtgcccccccccccccagaggagccactggcagttgatggcagctaataaagagaaagtcatttcctattctttttttaaagaaatattttagagggctgagagatggctcagtggttaagagcactgactgctcttccagaggtcccgagttcaattcccttgcaaccacatagtggcttgcaaccatctgtaatgggatctgatgtcctcttctggtgtgtctgaagaaagttacagtgtatgtgtgagtgtgtgtgtgcgtgtgtgtgtgtgtgtgtgtgtgataaataaatctttaaaaaataatgacataggaaatgtgattgcttgacaagggagccaatctaaaaagccaaccctttccatgtctattggttctgggtccaaatactcttcaggcagggtgtttgtacccgacctaacaatctaggttctaacctcaggaccttcgtggtggaaggaaggaactggtaggagttgttcctgacttccatatgtgttccatggcacatgtaagcccacatatatacataaatacatcatacatacatacatacatacatacatacatacatacatacatacattgtacatacatacctgaacaaaaaaaatatttaaaaattaaacaatacgccgggcggtggtcacgcatgcctttaatcccagcacttgggaggcagaggcaggcagatttctgagtttgaggccagcctggtctacagagtgagttccaggacagctagagctatacagagaaaccctgtctcgaaaaacaaaacaaaacaaaacaaaacaaaattaaacaatacctatacaaacccaacaaataaaccatctccattggttttgctttgttttttggccccttggttttaaccatctatcacacagcacaagaagggtcccgcacataggctgggagggtttcgtgtgtgcttttccctaaaattgcctcagcagagtaaccgaggcagtgtgctcagtcacatatcagtcctgggccggggcacatcagtcctctccttgctttcccaagcaccctagtgtgggttcccagggttcagcgctggccagagtggccctgtgcgtgactaatggggcgaggtgcgcctgttgctctcacccaaagcctagatggcacaaagtcagaggcacatatttgggggcatggcttcctgaaaccaccacgctctcaggatgtggttggtgagacagagcagagcattcaaccctggggacagattgctgagagttagggtgacctctcctagaccctgcacacaggagggacacacaggaagggacacacaggaagggacacacaggaagggacacacaggaagaggcatagtgtcctttagatgaggtcccccaggtaccaaagcctggagagagagagagagagagagagagagagagagagagagagagagagagagagagagagagagaaacagccccctcgttgagccattagccctaggaagaatgtcgtgacacaaggcatgaattccagaaatttattggaaacacaatacaaactgacaaatagatggcctctcctacggacagacaggccacactggcacggcgtgggggagagctttcccaagagcactgaggccagctctggttcgtgctcgtggcgggggggggggggaccagaaactgggaggagaggaacaggcaggggtgtacacagaaaccaggacatggctttctagaggggagcacaaggcaaggtactttagtgggccaattcctccaaaggagagcagggtcaactgtgcagaaaggctttccctcctggtaaagctctccctcctcagaagaatgaaaacaacctacaagcccaagcaggccactccgctgcttccttccccaagatcttagcattgcagaggaactgccattctctgaagacagagcaacaggggtacccctgccccagggctgctctcccttggccctctcttcctctccccctgctgcttgctgagcccacaggttcccagggtagctggcttctggctggagccagctggtgggaagcacccacggaaatccagagggtgggagggagaggccaagttctttctccccactctctgactcctcatggctttggctccttcgaagtggctctggcccgtagtttcatggccttgtcagtatgtgcatctgacctgtgctctccgctcctgctattcttactttagttaaatacaagttttgctctcctggctgggccctgagtgatagacactgggccgtagacaaggcagaaccgtgggagcttccagcagcctccttcagctctccacttccatacaccctcagtttatcagagcagtggcaatgtctgagggcagacatttcttgggtcctcccaggggacctggcatggccgaatgcctgtggagagagcctcagcttggccatcatctgctcactgagcagcggtgacatgtcatcgactcccatgacagcatcaccgtgggcctcagaaaggctgtggtgagaagctctcttaacaccaagtgctcaaaaaggcaaaggcaagagaccaggtcccttggaacctaccctgggacattcctgctgtgttctgggtttcccagtagtcaggtggaggagccaagttgcttacgttatgtgttgggaagggcgaggctgcaagagcccgctctcacaagcgaggtgagagagaacattctagatacatggggctcaaagtcagttgtgctttccccgaagccaactgggacccaggctaggacaggcctcctgtgctgctaccatccctggcgagccccttctccagatctcctggacctggcagagagaatgagacctcggcagtcagggtgactggtgcttagctgtcactcatgatgtgccagggtagaaaaggaaaataaacaggggggacaagcaagtgtttctccctgtgtctctgtgccatgtaaacccagggcagggtgagagacaactgtgttagctcttctcttttttttttcaagagaatatctatggtggcttgaataagtatggcccccaacgactcatgtgtttgaatacttggcctacagggagtggcactattaggaggtgtgactttgtgggaggaagtgtgtcactgtgggggcgggctttgaggtctgctctgctcaagctctgctcagtgtggcacacagtctccttctgctgcctgctgatcaagatgtagaacccttagttccttctctagcatcaggtcttcctgaacactgccaggcttcccaccctgatgataacggactgaacctctgaacctgtaagccagccccagttaaatgttttcatttatcagggttgccttggtcatggtgtctcttcacagtaataaaaccctaactaagacaatacccccaaaagccagttgctccctcttttgggtctttgctgatggcggtactatagtgaaatgccagccacctgcacgtgtttcatggggcaccactgacccaggccccacctgcagggtcccaagccatggcctagcagtgatggggacttgccatagctgtgtaaaggcatatgctgagaagaacctcctctccagagagctctgagagaggacaaggcagctggtaccctgaccaatgtcctcagccacacacaccctcctttctgctgcatg

SEQ ID NO: 229 - DNA, 1527 bp, Mus musculus
gctccttctccagcaccatgcctgcctgggatgctgccatgcttcccaccatgatgataatggactgaacctctgaacctgtggccaacaggagactacgcagatcacaggtcgcagatcgcatcactccaacctcccgattacctggccaccacgttgtgggcagaagagtcctgcctgctggccatggaacgccgtgtgagagtgaagtcttgggtagaagagaatcgggcctcctttcagcctccggtttgcaacaagcttatgcaccaggagcagctcaaaatcatgttcgttggaggccccaataccaggaaggattatcacattgaagagggtgaggaggtgttttaccagctggagggagacatgatactacgagtcctggagcaggggcaacaccgggacgtgcctatacggcagggagagatattcctcctgcctgccagggtgccccactccccgcagaggtttgccaacaccatggggctggtgattgagagaaggcggctggagagcgagctggatgggctgaggtattacgtgggggacactgaggatgtcctctttgagaaatggttccactgtaaggaccttggcacgcagttagcacccatcatccaagagttcttccactctgagcaataccgaacaggaaaacccaaccctgaccagctgctcaaggagctgccattcccgctgaatacacggtccatcatgaagcccatgtcattgaaggcctggctggatggccactccagggagcttcaggcaggcacatccctaagcctgtttggggacagctatgagacccaggagggctcctctaaggtgacaatgggagggcagtgtatagccctggccccagatgacagcctgctggtgcctgctggaacctcgtatgtgtgggagcgagcacaaggctctgtggccttgtctgtgacacaagaccctgcccgtaagaagccatggtggtgaccctcctgtgtgcgccccaagcagccacagggtgcctgagtaatgacctggtagctgcccatttccagacagctctttcagcctcattgcatctccatggacatcagcaggccccttgagtggttgagagctgtcactggcatcaaccctcctgcctagctcagcccaggatgccagactcctaggacatcagcagtccccgatcttctaacagccatagccctacactgtccccatgtgcccagcagcctgacactaagaaatctctcaataaaggcatcctgctgaatgagtgcttgcgagttttaggtggcagacctgtgttcccctgtcatgtgttacttggggacaacagttgccacagggagttagaaggcctgttaatgtgtgtcatcacctcttgtggataggtggttccctgtgcatgcaaccctgatccacacccgctccgcatcctgcttataaagccgcgtgcttctttgtctctccctctgttccctgttcattcatttagttgttaacatacttaaaaataacaacaaaccccca

SEQ ID NO: 230 - protein, 301 aa, Mus musculus
WTEPLNLWPTGDYADHRSQIASLQPPDYLATTLWAEESCLLAMERRVRVKSWVEENRASFQPPVCNKLMHQEQLKIMFVGGPNTRKDYHIEEGEEVFYQLEGDMILRVLEQGQHRDVPIRQGEIFLLPARVPHSPQRFANTMGLVIERRRLESELDGLRYYVGDTEDVLFEKWFHCKDLGTQLAPIIQEFFHSEQYRTGKPNPDQLLKELPFPLNTRSIMKPMSLKAWLDGHSRELQAGTSLSLFGDSYETQEGSSKVTMGGQCIAPDDSLLVPAGTSYVWERAQGSVSVTQDPARKKPWW

SEQ ID NO: 231 - DNA, 45783 bp, Homo sapiens
  misc_feature (1)...(45783): n = A,T,C or G
tggctattaacccgttatcagatacatggtttgcaaatattttctcccattttgtagcttgccttttcactctcttgatagtgtcctttgatgcacaaaagtttttaattttgataaaggtcctatgtttggtggttgtttggggctttgtttttgagacagggtctatctctgttgcccagattggagtgcaatgatgccatcatagcccactgcaacctcagactcccgggctcatgcaatcctcctgcctgagcctccccagtagatgggactataggcacacgccaccactgtctgcgaacttttttttttaaattagaaatgaggtcttgccatgtttcccaggcttgtcgtgaactactggcctcaagggattttcccacctcagcctcccaaaacactgggattacggacatgagccccagaacccgacccctatgtttagttttataagaaactatggaactcttttttttcaaattagttgtgccaccttatactcccaccagtaatgttgagagttccagttgcttgacatcctcaccaatgcttcatattgtcagtctttaattttagccattctaccgggtgtgtaatagtatctcattgtatatttaatttgcatgttaatttgcatttatacaatgcaaattaatttgcatatatttaatttgagcatgtcattaattgctcaactaatgatgttaagcaatattttgtgtgtgcttattggtcatctgtgtatctttataaaatggttgctcaaaccttttgcccattgttttgttgttttttgtttgtcttcttttttgtttttgggttttggtctttttttttaattaagttgtaggagtggctaaatgcctcgggtaagtcattgattttctgtttctttatctgtaggtagcaagtatgaattcctccatgacatctgggctacaagaaatgccaagcttggccactgctcacagtacccgggactcataagaatccatgcatgccttctcccatctaagacatgcgggatccatgccaggaagaatgaggcacatgccagaggatatgggggctgggaggagggcactaacccagagtgatttgaaatgaggtagcattcaatggcccctggcaaaaaagagaaagaagacgagggagctgaaaaatgtcttcatggagaaaggagggagggaagacagggagggaggggtggtccaactggccctggagcaggggaaaatggaaatgtagcagatatataagctaaactgaaatctcagcacagagctggcctatgaatttctcccagagggaccttctgcctgtggggtaaaagggagcataaacttccagttctgtttgcagagagccctgaggaactgacactgaccacagccagatgagaggccttctcctcagctgccaaattctgctctgcactgcccaacagtgtcttagctagggtagctggctccatcccagggccaacagccaatttcgattacattaaggaggcagtgtattgggggaccaacaagttttattgtttgataccctgatcttagaacctaaccctcccagaggtgcaaatcacaaccataaacaaatgtatcgtaatagagaattaagcttataaagatacatcagtcaggggacagaaactataccaattatttaacagagacaatgtaatacagagaactgttaactaggtttatggttattaactagataactgaaaagtcaaaaaaacaaatctgcagtatcacttaagttagtaactgcaagaagcagctacccactcgggctgagagaacaaaggaagaagttgaaccactaaagcttagaagttggaggaagagccctctgcataattgaaactcagacttctgaggaaaggctccagcatctgcactggcatctctgctgtggtcactttaaagctggttctgcaggtattgggaaaaccacagggtgggtttggaaactgctaagggagccagggcttagtggctcacgcctgtaatcccaacactttgagaagccaaggtgggaagatcgcttgagccaaggactttgagagcagcttgggcagcatatcgaggacctatctctacaaaaaatttaaaaatgaatccagtgtggtggtgcgcacctgtagtcccagctgcttgggaggctgaggcaggaggatcacttgagctcaggagttcagggttgcagtgagctgtcatcacaccactgcactccagcctggagcaacagagtgagacagctccagagtgagacccccgtccctaccactactactgctaataataataatagtgccaagcttgtgaaaccgggtccaaatggaaagtgataagtactcaactatctccctcagtgggtgtgaataaggacacttccagcctcatcccttggccactcaaggaaccagcctcgggatgaagctaatgctatgggtagcagatgggagggatggaaagaaccagggtccatgatggcgatgctgagtcacgggctcactctcctctgggtatccagttgtgtaagccttctgtctttctgttgattacagcattgtttaactaaggcctctgctactttgcagccacaagcatcttgatagattaggaaagcaaaaaagaggataaaaaagaaaccaggaaaagggatgtgtggtagatgaaataatccttcttggttcttttcaaaaatctcctgtcctgatccccggaatctgagtatgtcaccttacaaaacaaaaggggatgttgcagatgtgattaagtagttcgatgaagagattatcctggattatctgggtaggcccaatgtaatcacaaggattagttacagaggaaatgtgacaacaaaaaaagagaatgaaatgatgtgttttaatgaagaaggaaggcaccctgtgagccaaggaatgcaggtggcttctagaaggtggaaaaggcaagagaacagattttcttctagagttctcagaaataatgcagctctgacaataccttgatttagcctataagacccattcagacttctgaccttcaaaactataagacaatacatttgtgttgttttaaggcactaagtttgtgatttttttcaatttattttattttattttttcgtaaagacagcatctggctatatagcccaggctggtctcaaattccaggcctcaagccatccttcctccctggcctcccgaagtgctgggattataggtttgagccaccatgctgggcctgtggtaatttattatagcagctataggaaactcacacaacatggtagttacaaaaccaaaagaagatgctacgaataagtacaaatgtagcaataattaaatagatatgaaagagttgaatccaatgactactaaacacgtaactaacagattggattttttttaaactccaggtaggtgcccttcatgaaagatatatctaaaacaaaatgatgcagggaaaccatatacctgttgtctcagttatctactgcagtataacaaaccaccctcaaaacttaatgacttagtgccgggcacgtggctcatgcctataatcccagcactttgggaggccgaggcgggtggatctcttgaggtcaggcgttcgagaccagcctggccaacatggtgacatcctgtctctactaaaaatacaaagttagccgggcatggagtcacgcgcctgtaatcccagttacttgggaggctgaggcagtagaatcatttgaacccgggaggtggtggttgcagtgagccaagattgtgccactgcacttcagcctgggcgacagagtgagactgtctcaaaaaacaaaaccaaaccaaaccttaatgacttaggaaggtggctttagtggccgcatgaagcacaccctgattgccgaggaacaagagtgcaaagctaagaaactgaggcattttgaagagtttgaagacacttggcttccttatctgacccccaaagatgaattctatcagccgtggcagctgaaatatcctaaattaattctccaagaagccagcagtgtatctggggagctccataaagaggctcaagaggccgggcgcagtggctcacgcctgtaatcccagcactttgggaggccgaggcaggaggatcacgaggtcaggagatcgagaccatcctggctaacacggtgaaaccacatctctactaaaaatatttttaaaaattagccgggcgtagtggtggatgcctgtagtcccagctactcgggaggctgaggcaggagaatggcgtgaacctgggaggcagagcttgcagtgagctaagatcgagccactgcactctagcctgggagacaaagtgagactccgtctcaaaaaaaaaaaaaaaaaaaaaaagaggctcaagaagcttttctcacactgcacaagcatggctgcttattttgagccctggttaggatccaaggcaaagatttgctcacttcagtatctcccatcctcattggtaatccaggttgcacctacaagtccctgaacactaggttctttatggtaccatggccagtgaaagggtctaatataaaatacaccgagggtcaggtgcagtgactcacgccctgtaatccagcaatttgggaggctgaggtgggcagatcacttgaggccaggagttccagaccagcctggccaaaatggtgaaaccctgtctccactaaaaaaaatacaaaaattagcatgatggcatggacggacctgcaatcccagctactcgggaggctgaggcaggaggatcgctcaaacccaggaggcagaggctgcagtgagccaagatcgtgccactgcactccagcctgggaaacagagtgagactctgtctcaaaaaataaaataaaatacaccaaggctgaaatagctgctgcttgtcagaccttcctcaaggtcaatgactacctgcagatagaaataatctaggctttggaagaacttgctgccaaagagaaagctaatgaggatgctgtgccagtgtgtttggctgcagatttccccagtgctggcatggggtcatcctgtgatggacaagaagatgaactggacataaagagtagagcagcatacaacgtaactttgctgaattcatggatcctccgaaaatcccacacctgaaagagaaaccttattttggcatgcggaaaatggcagtgcgctggcatcatgctgaaaatctggtggacaggccccaaagaggaaagtgaggacgactctcatcttgaaggcagagatcttgatacttggcatgttggtgttaagatctcatgggatgtaaagacacctggtttggcaacaccccaaggagactgctatttcatgcttggtaatctttggagaaccaaaattatattgctactctagcatctaaatttagattattgggtatatattttgaatatgtcttataaagtaaacttctggagcatttgatattaatagtgaaacttctttacaagaacatgtaactaggtttttcttttttgagatactactaaattttaaaaagttgcttttctttttattctaagtagttgtggagttcctcaaatatgctaaacaattttcagaattattcatgaaagctattaaagcatccaagtcaacttattagtataacttgaaaaaatgtggccgggcgcggtggctcacgcctgtaatcccagcactttgggaggccgaggcgggcggatcacgaggtcaggagatcgagaccaaggtgaaaccccgtctctactaaaaatacaaaaagttagccgggcgtagtggcgggcgcctgtagtcccagctactcgggaggctgaggcaggagaatggcgtgaacccgggaggcggagcttgcagtgagcccgagatcgcgccactgcactccagcctgggcgacagagcgagactccgtctcaaaaaaaaaaaaaaaaaaaaaaaagaaaaaatgcttccctgtctatatgcgtttttagtagtgagagagttttgtctagttttgaatttagttcttctcaggaacagctgacctgacaatggggcctttctctcaacttgtcatttagttctttcggaagaaatatctcagctgtggttaggctaacttaagctgtagagtttgtggggctttttttttttttcttcctgctgtaagtttttattttgtttttggactttctacttgttttccaatacgcaatgtgcaaacagtatccttttttactcaaagcttctcggggcttattctttacttggctctagttcctgattcttgggggtttacctcactcttgtctacctggagaaatctactcatatgttagttttggagcccggaagaaccagggctgacactcagtatttataataagagttaattcccaatttggtatttgtagagagtccactgtgttccaagtactgtgtaaggttccggaggagatatcggaggtggataaatattggtccttgcctttggggaattcagagtaccgaatagctctttaggccattctctcattaagtattttccaaatttcagctctttgcacatcagcttcaaggttttcgtcatatccatgtactacttgtataattatttacatactatttctgcctagataaactaaccttttttatcttagaaaaaactgaatggcttaaagtaacaagtaagacagctgggcaagtctctgcatgtctcccctgggttcactcatgcagctacagtcatctcagatggtcttacacagctggtgcaggctgttggccagcctcaccctccacattgtctctcatcctccaggacactaacccaggcttctacacatggtgggagcagcgttccaggtgatgagatcagcagctgggagacctggtgaggactagactcagatgtcccatagcattagttctgctgccttctgtattcacaagtcacaatgccaaacatgattcaacgaataaggaaatggacttcacctcttattagaacagaggcaaagtcacaaggcatatggattcaggaagggaaggagttattgtgtcatttttttgatcaacttaccatatctggaaaacactagcacaaagtgggtgtaggaatattaatatcaaagttgaagtcaaggtgaaaagaaactaagaggaaatatttcttagagataaaagaaacactacaagaagaagataaaatagtcatgagcatgttttcgtctaatgacatacattcagaatatgtaaagcaaaagctgttaaagaataaggagaggctgggcacactggctcgcagctgtaatcccagcactttgtgattacagcactttgtgagcccaggagttcaagaccagcctggacaacatggggaaaccccatctctacaaaaaaaatacaaaaagccaggcgtggtggtgtgagcctgtagtcccagctacagtgaggacaggcaggaggatcacatgagcccggagagattgaggctaagatcgcaccactgcactccagcctaggcacagagtgagaaccggtctcaaaaaaaaaaaaaaaaaaaaaaaggaaaaattgaccccaaaaatcacagtgttagattttaacatatctctcttggaaaataaaatattaagcactttaaaaaataaagatcaagactatttgactaacacaatagcatgacctaatagaaatattctgaactacgttctaagcagagtatacacattcacaaaaattgaccataagctaaactgcaaaggaaatcttaacacatctccccacccaaaaataatacaacacggaccatcttctctcaccacaatgcaatacaattagaaatgaaaaacaaaacgatagccaaacaaaaaacaaaccagtgtatgtctagaaacttttaaacagacttgtaaataactcaagttaaaggggtagcaggaccagaacctagacttccaaataaccagtgtagttcatgatctagtccttttgttcatataaagctatttgttttaaaatagttgctgaattacatgaaagggtgagaaagtgggagagacagaaaggcagagacaaaacaaggtgggctgggaaagggattcactggagcaacgagttcagtgtatggaagaattgaagggtcagatagttattaccagccaggttcagcaaagcctagaaggatctgctggtctcagtgacctgggcaggcaaacaccacccagcggaggccaggggaagacaccagcaagcaggccagatcctttgagcttggatcgtagggtagattctatttgcttctaatcctttagtgcagatgagctcctgtgtgcagaggagagaggtggctcctagaagcgggtaaattccagaaactacaaggggcccaacagtcagtatccagaaggattccagatggttccaactcaacaatgccagaatactcacaacatagcaactgtccgttttctgaacattggagtccagtggtgcctgagccaggaggcttgccaattcagtagaccagacgtggtatttgctctacacagcacaaatcagagggcatatttgatagtgataacatagcagtcatttagcttgtgtagagggttactcgggatatttcagacccccaaaattctacttgtggccttaattattcacattatttgatcacatcagttaaaatacagtgtacctatcattctttcctttgcactatggtaacggaacatctgttgggctgaaatcaattttttctcctttttgtgtgaattcattgatgccttcatccacccactcacccatccctccatttaactaacactcaaagcaaacttaacacatctcagatcctcagtgcttcatgtgtcattgtttacgtctcctctgattacttgtagatgagaaaaataaagaaggtggtgtgagttacttgggtgcaaaacgatattctagttttgcactagaagtgctcagctaaaactgtgctagataaataactaaaaaaaaggagagagaaaaatgaaaaaaaaaaaaaaaaagagcgtcagagaggaaacgggagggtctcagtggggaattcggcttcctgtcgtctgggttttgattttgagttgcactagaggagtctttatgtctggaatgctgagaaaaccagcccaggccaggcgggctgtgagggcaggatttggaggcatttagtttcttaaactctatagtctggattccggtgtcaggggcctgagccattttcctcctcccctacccgtcagctcccactccctccaaacttcctaagaaagttctgagtcctgcagaaagacaggcttctccatcttccacacccgcgcagatttctctttcctcacacatgcacgcccaggcccagcgccccagcccctcacccccaggataactgttagagtctctcacacggggctgtcatcattaacaccccgagattcccgagggctaggacactgaggccggtgtccacatctgccaaattcctcccatagctgcgtgcgaactgagtatgttcctaagacgcctaaggagttcagcacggggctcggggtccactgcgacactgcgcggacagcggccgctcggctgggcctcaggtggggagggctcgcggtcctgccctgagcccgggctccgcagctcggcgcctgcaccgctcccctcgccgagcccgcggcggagtctgccggccgcacgcagcaggtctggggctcaccttgaatcgggacctgcggggaccgccgtgcggcttcccgctgggtgagcgcggcagccctgagtggcggggcagtcattccccttttccagatgggaaagccaaatcttgagcccagcgccagcaccgtgttctcaggtgctgggacttccaacccgcgatctcctcactgtagtatttctgggaaccttccctgggattcccctcggggcgtagagggaaggaacgtctggggacaagcgtccaggaagggtctggattctttgtcctccgccgggagcaggccccaccgcaggcgccagtgtgtggggcgccccggagacggtggcggggaccgagcccctgccccgcggagaagcagggggcgcgggacgccgttccccagcgctgccgccgccgcgctcgccagggcctggagtggcgcggagggcggcgggctcagaccaaagtccaccagggggcaaagtccgcgggccccaagcccccaccacggggtcgcgggggtttgctccgcctcgtgagcttgggattctggttaaaaaggcggctgggcggagctgcgggcctccgacggcgggaggacagcgctgcgaggaggcgcccgggacagtcatggagcgccgcctgggagtgagggcctgggtgaaggagaaccggggctccttccagcccccggtctgcaacaagctcatgtgagtccagcacccccatggccgccccctgccctcgcctcctccccctcctccatctgcgccctcaccttccagctccgagttcctggacccagaagcttgcagaaggaccgctttaatctcttggttcttgggggaagatggagacaggctgttccggttccaccacatcggtctgttcctctttcttgtgactgtggccttgacttctgaagaaggctgagctggttctgaggctgtaggagatgagatgacagggtgcacctctccttccagggctgagaaacaattctccaaccccaagtgacactgtgcattttgggaaaactcaaaagtgtggggagggtggttttcaaggcagaaatgcactagaatgtaggcctgggggcagccaaatcatacaccccaaccctgtcccagaagccacaggcaaagggggaggcagagaatccactcctttgggaagatcttgatgtcttgcttttttcagggcccctctatgcaggtgtgcacgaacacacacacacacacacacacacacaccagaccctccctaggccacctctgccagtagcctctgcctgcagcacccaacagggttggccatccagctgccatctttctcaggcagacctctcaggccctcccctgtggtatggtcacctccctcatccccccagttccacggcggggccccacatgccagctagatcaaggtttacattccccatttttgctgtgtccacaggacatggtcagtagggtggcacctcaaggcaaacagcaggcccaggactatgccaagtgtttttacatcatctcatctcattctcacagtagcaccgtgaggggggattttcataagtaacttttctagtgtcacggagcgcctgtgcgataggctccagactcaacccacggagcagttcgactccagagtccacgcacactcttggtcaccatgcaataccacatggccaacagtcaatatctccccaaagatctcttctatcactgttgttgcccacccccaattaaagatgtagcatcatctttgcctccttccaccacttcatccccatctgcagtcgctccttctcagtcctcccttcgctccccctgaggtctcgcgtccatctgcccaggcctctccctagcatttggtggtttgctggcatcattggtattcttgcttctgctgtaccacgcccacctccaccttcgtcttcacaaggcagtctccttgtgtgtgtgtctgtgtccaaatttccctcttttaaaagaacaccagacatattggatcaggggctcaccctactccaggatgacctcatcctaacctaactacatctcaaggaccctattccaaataaggtcacattctgcagtactgggcgttaggacttcaacatataaattttacaggaggggttactattcagcaaggtgagaagctgctgaagcaagcaaggtgagaagctgctgaagagttctgggcagaggaggggcaggtcgggtttatgcattctgactgatgggttgaaagagttcttgagtggagttgtttaagaattgtctgtatgtacctaaattacatctcagtgaagttgattttaaaaaacaactttcaagccgggcgcagtggctcatgcctgtaatcccagcactttgggaggctgaggtgggtggatcatttggggtcaggagttcaagaccagactggccaacatggtgaaaccccgtctctactaaaaatacaaaaattacctgggcgtggtggcacgcgcctgtagtcccagctactcaggaggccgaggcaggagaattgcttgaacccgggaggtggaggctgcagtgagccgaagttgtgccactgcattccagcctgggtggcaagcaagactctatctgggaaaaaaaaaaacaactttccaggttccccagcaccccttaggccaagaccagactccatggctggtccaccctcctggaccagccttctcaatcgttccccaagctcacccccagtgcttctaatctcagagcctctgcacccagctctcctgtgcacactcttccccagtcaagttccttgcggcttccctcccctccttgaagctctatgcagctttaagttctttaagcatggactgttcatgacagccttctcctgccctgcgacctcatccacctttccaaacatcaggtccacacgtgtgtttccggtttattgggcccagcctcccaaaagggaaggaaaaggaaagagactggctcttccgtcttgcctccatgcctcccagctgggctggaaagcagcccacaggacaggacactcagaaaggacctgccagtctagtttgggggctcagacctcccccatagcccctcccctgccatccacaccatcgtcatccatgcaggcagcctctaggctgctgtgccctgtgtgtacaaatggtcccagacccagcgcctccccttcccagaggaaagccctcgcccctgccctctgtggcagggccacctgagaacaccctgaagccctacgcagacacattctgctgcttattcaccccagtgtctgcaccctgaaaggggaccctgctgtggggatggggcaggctgttctcaggaggtgctgaggtatttttcgcataaaaaggtaacaccacaccaacagcagaaagactgaggagtttgggaacccttttgttccaaacagctgactagatgccccacagacccaacgccagcatgggagtcaaggagcctgagacctggctcaggttcagtcattccctggctttgtgaccctctcttggctggctaaatcggctgtaaaatgagagggttgtattgagtttatttatttatttatttaagacagagtctccccctgttacccaggctggagtgcagtagcgcaatctcagctcactgcaacctcacctctcaggttcaagcgattctcgtgcttcagcctcccaggtagcggggattacaggtgcccaccaccaggcctggctaatttttgtatttttagtagagacagggtttcaccatgttggccaggctagtggcctcaagcaatacatccgcctctgcctctcaaagtgctgggattacaggcatgagccaccacgcccggccgggtttatttattttatcaaatacttaaatagtgcttactatatgctaggcaccattctgagagcttccaaatattaattcatgtattctgtttaaactctgtgaggtaagaactgttcctctattttacagataaggttagtaacatgccccagggcctgtgcttataaacacatgccacactgacttgacaccgcctgaggcccctgctagatgtcacggtctcctgcatccactgagccatgcctccagccaggggagagtgcagggtcctatagtcagacagcatgggtgagtggcaggtcaaggtcgttttgcccctacactgccccatcctgggaaggggtcttcaatttgctactctcctgtaattcgagatcttgatcctgtgatcctggttgatgaagccatagattcaccaccacatcatttcccttgttgggtcagacgatgtggggggacacacaaacaatgacagacagacacacagacacgatcccagacacatagacacttagatgcacgcaggcatgaaccggggatgagagttggggaacagggacagtgaggccaaaacagccctgctcctctcccaggggccctcaggctccctcctggcccccacgggacccgtgctctcttcactcctaggagatggtttagaacgtctcccccactttgcgcattgcaggcaccaggagcagctcaaagtcatgttcatcggaggccccaacaccaggaaggactatcacatcgaagagggtgaagaggtaggtttgactggtctccctggatctaggcctgcgggcaaggagcctggccctagcgggagggggcgcttcccactcgaggcccagagatgatggactggagaggggtggacatgtggctgatgagtggagggggcacagctgaaatcacagggcacgactgctgcctccaagctggtggtcaggcagtgacgcctccacagctagcacctctgctgggggagccccaggaaacagcccatgccctgcgggtgagaggttttagccgtggggcatcctccccctggatataggggctggccttgtgaagggggacgtcctggtcccctccccacaaacttgacagattcaattggtctccaaaatgagatcctcccccgcagacgggggcaaagtgcaaaaacaccgtgggtgagggctgggctgagtgggtggcagagggagctcgaggggctgagggaggaggagctagtggctgagggttaggcatggtagggaggtgcctggagctgaaggaggagttggggcagggtggcccttccttaactaaaggctgcaaaacccattcgtggcttgtggctggggcaggtgggagggggaatttgccttgaatcaccttttgcaccttgaagtttggactgtgcttctctactacctaccccaaaataaataaacaaaagcaaaatttaaagagaaaggtgtgtccccttaaggagagacacagaatctcctctggtggaaaaggatcagtagaggggctccccatcctctcagggagcctcattctgggggttcaggatccagagtccagcttgatcaacagcctctgtccccactgagggcatccaggccacagccagggactgtggtgagcatgggagaatcacttgttcaataaatatttgctgagcacctcatgtgtgcactgggacacccaaggctgtgtggaggaacgatgggccctgggccagcagaaccagccaactcctcacctctcacgctccaggggccctgcacctcccctggccacccccttctcacaaacacacctcactggagaccgtttccttggtggaaaaagtcaataggaaaatctaaaactatactgaggaggtgggtagacctggcatggctatggcatgggaggcacagctggctgcggagtcttccagaggcttctgccttctctgttggccctggtctcagcacccgcctctcctgtctccctctgtctttgcttcccttctcgccccctgctgcctctgctccatgccccatcccatggtttctccaagctcaggtgcctgagtgtcccctgaggggcctggccagcagctcacgtcctgactcagatggcagctgagtgattgagtgataagaagagctggccagcacaggtgtcctcactctggagggacgcccaggtgtctgggaggaatctggctggaggtgggcttgtgacagggcttggtcccaccctgctgaggttttggtggcggggtggtgcagcacttgggcagcctcagggctgagggtcggcctcctctctgtccctgcctatcctcacccagctggagcctggggagactccaggatgcgctgtggaagtggcgtaactcagggtccgggctcctcctgaatagtgagaaaaggggagttgctcagacctgggttcaaatcacacctcttaccaaaccacactttcctcctcactgagctctgcctctgcaatagcggtcagggtacctccagctccctggcccggctccccactccccagcgccacctaccacctatactccacctacctcactcctttcttggagcgtgcaggtgcaggggggccagaggcagatgaacttgcattgggggaattctctgccgcttactaaccccaggatcttggacagggcacatcatgtcacctctccaagcctgtttccataagcacatggggacaacagcccctgtctggtggaagaattcaatgtgcatagagtatgtgcacacagcctggtgcagagttggtgcttgatatgcattgttcctctacacctctcgccctttctgcctggactgcctgaaaggcctttccaggtcagaaagccagattctattcattatctgcctgagccagtacagttaatcttctagccagccccaggctcccaaacatcatttacttccaaactgagcataattcctttaggattgcccacagctgttcaggattttctgctgttcagtgatctgtacctctgccccaggccaggcctgcccctcatcacagggaagacctctgagcaggggacaagagcgagaaaatagagacaatatcgtatagcctgcccagtaaggcagtaagggtttaaatctggcccagagggtcactccggactcccctctcccaacttttcctttgtccctcctcccttccctcactgtgaaaggtccctagacacacacacacacacacacacacacacacacacacacacacacacacacacacacacacagaggcttcctcccagcttggagagtgggggaggagagcatactgaaatgctccctataagagaacctggtaggtttcttattatttgtattaaataatgcttatggggtttttgtttgttcatgtttgtgtttgtttttgttttttagagatgggggtctcactctgtcacccaggctggagtacagtggtgcaatcatagctcagtgcagcctcaacttctggggctcaagtgatcctcccacctcaggctcccagatagttaggactacaggcacacatcaccatactcagctaatttcttctagtttttgtagagatggggtctcaccatgttgcccagaatggtctccactcctggcctcaagtgatcctcccatctcccaaagtgctaggattacaggcataagcctccacatccggcctatgggtttttttttaataaggaaagtaaacattgttccttgtagaaaatatgagaaatatagaaagaaaaatccttacctcattcataatcctaccacgcagagggccgctgtgaacaggctgcctctgttatatttgtattgctacaaactaaagccctgctgggtatagttttgaatctttaacgtaactttagcattttccattttcccattttattaacagctattcaaaaacgtagtttttaatggctgcataatgttccatattttgaatctaccatcaaatatttacatttctcctataattatattagcattacttttgtcattcttaccatcatcaatactaatagctagaggcttactgagggcttactatgcgctgagcacatatgtgtaaagcatccctggcatcttcacagctacattttgagtagataactgtcattatgtagatgaggaaactgaggtacagaaaggctaactgaattgaccaagggcacacagcaccctggcagagctgagggcttttaactatgcactgcattgaaaacagccttgaatgtacaccactaggcaggtatgtctctgatgaactgaggtctcattcctgaggtagaattactgaggtcaaggttgtgtggtgaccagctatctggattcacctagaactttcccagttttagcactaagggtcctgcatcccaataaaccccacagtccctccaggggtgtgaactgccaaggcacttcacgcccatggccaagttgcccttcagaagggtggtgactatttgtgcctagtggcagactgcagagccacatctctctaggtccctcgaggtcagcttggtttctcttagtagatgctgttgataacattccttcaagtatttggctggggcttttaacacccaggcaatgtgtgactggtggagagaaaaccggtctgcctcctcctcttcctcccagttccatggggtgatctcagtaaattagggacttaggatggaatcggaaaaatgcagtaggaacccccccgcccgccccccccacctccccccacccccaggagagcacaagaggcatatgctcccatcccccacagcccctaacccatcccaggctgccagcaacctccacagccccaccccttgccaaggtgtcactctggccagtggctccagagccacatacggccttggatccaagctgcggctccagctggagactaaccagctatgtgaccttaggccagctgttttaccctctgagccttgtttttctttctttgttttctgctgattggggttaatgatacctttggaggttgctgtgaaggtttctggtggaaaagtgcctggcacagcccctggcacccagtaaatgggtgggttccctacctgactgctgggtcattcagttccccagtgagcatttcatccagttcctgcccgccagccaggcaaccactgttgcatcctgggtactctggtcatcacttgcatgtccaagacatgatcccatgtgtccccggcactccatggcatgcaacggggagacaggcctcaggacagaagtgacggagctgcccatcaactccaaggccttcagaaagtttctcaggtttcccggtcagaattcagggcctgggcagtggccaaggacctggaagagaaagtgcggagggtccaagcctctctcctgtcccacaggtattttaccagctggagggagacatggttctccgagtcctggagcaagggaaacaccgggatgtggtcattcggcagggagaggtgaggccggatcccagcagggtggggaagagaaaggcggccacagctggaatccgccctgtccactcatcctggccctggctgaggtcttgtcctccctaccttttcctgctctcccacaccttcccctgccaacctgccccttccccatccttcctcttccaggctgccccatcctcagcacggtccaacattccctctggttccctggtgtagaggctgggcagagaagagggcccagggtagacaagcagtacccctttgctgcccgggggtcagctggggatgcccaggatgttgggggcgctaaggtctccatgagggattgcagcctcactgtgcaccttatctctaccactgcagatattcctcctgcctgccagggtgccccactcaccacagaggtttgccaacaccgtggggctggtggttgagcgaaggcggctggagaccgagctagatgggctcaggtaaattctgtctggagggctggggcagagaaagggcaaacagcagaggagcacagctccaaactgcagctgaagggatcctagatagactcaagaaagcacgtcctggccactgagtgggcaggagggcctcacagcagaggcagtggagatcctgtctttgttggctgatggtggaggggtagagtggggtggattctgttctctgtgaccccctggaagctcactcagcctgatgaactttggctggaatcagaatctgtgctttctgcgtgaggttgtgaaccttgaaaattcgagacaggtctcagttaatttaaaagtttgttttgccaaggttgaggacgtgtgcccgtgacacagcctcaggaggtcctgatgacatgtgcccaaagtcgtaagagcacagctcggctttatacattttagggagacatgagacaccgatcaatatatgtaagataaacattggttctgtctggaaaggtgagacaactccaagcaaaggtgggaagactcaaagtgggaagggggcttccaggtcacaggtagataagagacaaatggttacattcttttgagtttctgattagcctctccaaaggaggcaatcagatatgcatttatgccagtgagcagaggggtaactttgcatcgaatggggggcaggcttgccctaagcagttcctaccttgatttttccctttagcctagtgattttgggggcccaagatattttcctttcacatttcccccttttcttttttaaaatcttttggagaaagcattttagaagaaattgagtctctggtcccaggttttgtctgatgtctcatggctaggatggtttattcctagacgggtagatcccaagttattagggaagttcagttttagaaagctgtgaagtctcatgtctcacaaagagaaaatagggggaggaagggagaaaaacaacaaccaacagaagagcaatcctggaaaatcgatatagaccacattactctgaagttcacacatcagtaggcaagtatgaaagtggcttaggtacgtaaattggttgctgacattttcttctgaagtttaagttgtcaggcttcagttttcagggctttaagaaagcacagctcagctttcagtgactccaagttaggaaaaacaaacaaaaaaagaagtaaaaaaattgaaaacattattttgaagacttgtagtcaagaaaaattagaattcagtccaaatcacagaaaaataataaaaattgaaaaacattaggcaagactagaatctaacatcaggtatactatagttttcaaaacataatttttctctctccagtttcccctttttactaaagacaaatcatggtaagactgatttgctttattatacttggcctaattatttgtatacagtgcagcaagaataatttttttttttttgagacaaagtttcgctcttgttgcccaggctggagtgcaatggcacgatctcggctcactgcaacctccgccccctgggttcaagtgattctcctgccttaacttcttgagtagttgggattacaggcacccgccaccacacccggctaattttttgaatttttagtagaaattgggtttcaccatgttggccaggctagtctcgaactcctgacctcaggtgacccatctgcctcggccttccaaagtgctaggattacaggcatgagccaccacacctggccaagaataattattttttacataggcttttaaattggctttgatggaactttgttccatagaaggaatctcagataagacctttttttaaagccaagcctagccatggatatgtgctattgaatacctatgagttgggtgatcttcttgaggttccaaggtaaacttgaggcctttgggcgtgtcagagacagggtctttacttaccaaaggtcagaaaccctatacagggaagatatgaggccagtttccctaaagggtttttattggctccataaaccaataaaggaaagcacaccattccagtcaaatccttgataaaataaccagtttctccaattgtgtcctgttgcaaaatgaaaacagattcttattgcacttatgcacataactgtattgccataagttaagaatactcacaaatagcttccaaattctggagaaatcaggtagagagaaaaaaatatgctccaaattttgttcatgggagtatactaaattgttgtgtttttttttgagacagagtcttgctctgtcgcccaggctggagtgcagtggcatgatctcggctcactgcaagctccgcctcccaggttcacaccattctcctgcctcagcctcctgagtagctgggactacaggcgcctgccaccacgcccagcaaattttttttttttttttgtatttttagtagagacagggtttcaccatgttagccaggatggtctcgctctcctgacctcgtaatccacccgcctcggcctcccaaagtgctgggattataggcatgagccaccacgcccggccgggagtattaaattgttaaaagctgtcaatagcacacacaaaaaagtttccttgactctgaaaaaaaacaaaataaaacaaaggatcagcaacatttaaagcaaaagtaaaaaagattactttagtcttctatgagttcagtttacttagtttactcctgttctgcttgatactcatgaacatttcagctctccatgagagtcctgaaagtttttcttctctattctaatgtcacaatctccaaagttatcagaaacctgcacttaagaacacctgtgttcgccgggcgcggtggctcacgcctgtaatcccagcactttgggaagccgaggcgggtggatcacgaggtcaagagatcgagaccattctggccaacatgttgaaaccccatctctactaaaagtacaaaaattagctgggcatggtggcatgtgcctgtactctgagctactcaggaggctgaggcaggagaatcacttgaacctgggaggcggaggttgcagtgagccgagattgcaccgctgcactccagcctggcaacagagcgagactccatcttaaaaaaaaaaaaaaattaaaaaaaaagaacacctgtgttctagagctgattataaagccacctcctaaagagaaccaaaacaggacaattttctgtgaatgacaaaaagttttaaggcagccatagtcaaagacgcagttggcaaggaaatttgttacctctgtggcacacaataatttaatataattatgattattactgatgatgtacactaagttttatcaggattataggagtttcccataattttggaatacataccaataatatatttatacaaatacagcctaaagaaaaccaaacaccatttcatatttggcaatgcttcctgtataatttttataccaagtaagccaaactatgtcattttgggactttagggaacccaatatcttaacagattaattaggtcagaaaaagacataatttatcatttgattttggaaagtttgtcaaatatcaaaggtttaaaactcttgatatcacaatataggatcattcatttaaccaaagtaataactcaaggatttcaaaaaaggtgaaaaccttcattctttgagaagagacttaatgttccaaacaataagctctaataaaaatagcatgaagctgggcgcggtggctcacgcctgaaatcccagcactttggaaggccgaggtggggggatcacgaggtcaagagttcaagaccagcctgaccaacatggtgaaaccccgcctctaccaaaaatacaaaaattagctgggtgtggtggtgtgcacctgtaatcccagctactcaggaggctgaggcaggagaactgcttgaacccgggaggcggaggttgcaatgagccaagatcgcaccactgcactccagactcggcaacagtgagactctgtctcaaaaaaaaaaaatagcatgaacccaattaactatagttttcaaaattatatcttgaccataagatataatttccataaacctttcataacctatatttaggagtcagttaatgcttcaataaaacctttttaatctgacacaggggcccatatgctggtcttgcatcagtgtacctttgacattaatgactaatttatagagaaactgaacttatttatttatttatttgagatggaattttgctcttgttgcgcaggctggagtgcaatggtgtgatctcagctcactgcaatctccacctcccgggtccaggtgattctcctgcctcagcctcccaagtagctgggattacagacatgtgccaccatgcctggctaattttgtatttctagtagagacaaggtttcaccatgttagtcaagctggtctcgaactcctgaccttacatgatccacccaccccagcctcccaaagtgctggaattagaggcgtgagccaccaccacacccagcgagaaactgaacttattttatctctcaaaattggtccttacagtctcccatgcccatctcttacatgatagtccctgggccttgaggagctttaatttctgtccctgtgtttcaggaatgcagtttattttgattggcatcttctactgggcctgaagatggggctttaattgctgtcagtgtttaaagtttagcaggacttggtcaggcacagtgactcacgcctgtaattccagcactttgggaggccgagacaggcaaatcatgaggtcagagtttcagaccagcctggccaacatggtgaaacctcatctctactaaaaatacaaaaaattagctgggcatggtgacaggcacctgtaatcccagctactcaggaggctgaggcagaagaattgtttgaacctgggaggtggagggttgcagtgagccaagatcatgccactgtgctccagcccaggcaacagtgcaagactccatgtcaaaaaaaaaaattagcaggacctggtgtcctttttagacccaggagtcaaagccctgtaacttaatgtcacaaggacattaaaagcacatacagagagatacacagatgtaataaccttaacttttgaaaaaatttaatctcagtttttttcctaagcaaccgaaaacttaataataatgtgataacttgatcatataaaagtttttgggttttttttttaaataaatcctcttattgtgacttacacagaccattcatgctatgcttagactttctggtttgtcctgaacatccctccttcttcaacaaccagtcattttactctacaactaaatttaccatacaagagtctttctcatatgaaattatgtctctttaagctttcttaccacaaaaaacctctttgtttttatgactttctttacatgtcttttatttcctgcttccttttaccttgttttatacatgacctttaaataagccttaaattagataaaatggttcactttttttaaaaggacacacctttttttttagaaagaatgttttcctacaaatatatttttattggaaagtacccaaataatgaaatatctattatttaatttaactttagattctaaattatgacaagtttgtctacaagtatttatcctattgcatttacataattattttaatcatttacttagattatttctaaaaattgtgattgtcattatttaaagttatggaaccaccattgcaaaattataactgagacagtgaaaatgatttgacctaactgattccatcttgcttctaacctccaagctctccttgttcataggctgaactaactttgagaggcacttagtttagttaattagagcccctttttatattttcagcagtgaaacattgtgtacacaacacatagatagacgtcttaggcatgctaatagaagtgcatcttatagattcatagcaacttttttttcctatcttagactttcacattctttttcttcttttctttctttttttttttttttttttttttgcgataagagtcttgctctgtcacctgagctggagtgcagtggcacaatcttggctcactgcgacttctgcctctcaggttcaagcgatcctcctgcctcagcctcccaagtagctgggattgcaggcgcccacaaccacacccagctaattttttgtattttagtagagacaggatttcacnnnnnnnnnnnnnnnnnnnnatccgcccacctcggcctcccaaagtgctgggattacaggtgtgagccaccatgcccggtcagactttcagattcttgataacctgttttacaaccacaggcagttgtcagctaaatagccttaaagttgcatattaaaggaaacaactcgccggacacggtggctcaggcctgtaatcccagcactttgggaggctgaggtaggcggatcatgaggtcaggagttcaatagccacctggccaagatagtgaaaccccgtctctactaaaaatacaaaaaaattagctgggcgtggtggcaggcgcctgcaatcccagctattcaggaggctgaggcagagaattgcttgaacccaagaggcggaagttgcagtgagccaagatcacgccactgcactccagcctgagtgacagagtgagactccatctcaaaaaaaaaaaaaaaaaggaaacaactcaggtgaaaaatcaaataacaaaatttccatcataaggtacagagagaagtcggatggtgctagagggagattaaagatggatgctggctgggcatggtggctcatgcctataatcccagcactttgggaggcagaggcaggcggatcatctgaggtcaggagtttgagaccagcgtgaccaacgtggagaaaccccatctctactaaaaatgcaaaattagccaggtgtggtggcacatacctgtaatctcagctactagggaagctgagcaggagaatctcttgaacccaggaggcagaggttgcagtgagtcgagatcataccattgcattccagcctgggcaacaagagtgaaactctgtctcaaaaaaaaaaaaaaaaaaaaaaaaagatggatgccaagtcaaacataaaattacagaaatctatcacaggattgtataaggataccaattttatttagatagggaccacctatcttttaactagatctctgagctctgggcaaagtccacaccgaatcctgggtctccaaaaagggagaattattatgagcttagaccacgtgatgcttttacagtgcactttaaaaaaagttttttttaaacaaagacatttctaagtatctaaaccacactcttccacatttgatcttagccaaaggcccagaagcgataaaaccacactcttccttaaaaactcaagagtaagagtaacctcagttacaataactattttagtaaaaaaaaaaaaaaaaaaggataacacaatataaaagtaagcagtttaacagctgagaccatttatctttttacattcttggggttccataaggaaaaacagatttctcccccaaaaggagtctagtgccttcttcattttctttaagaaaccccaggctactataaactattttaggtccctcatgcagcagagggtgcaggagaaaggagagacagcagaagtaaatgaagaaaacagaattcagtcaactgagaagaaaaaaacttttgctcaaaaaaaaaagacaaggtcctaggagaaaaacaaaaacaaaaacatgaaagttaaatacacacacacacacacaccccttggatgttagcttttaattaagctgacttttaaccactgagctcctttaaaaaaatctttttaaatctcattaccgtatttcagctggaaaaaaatgctgctgtttcagaagtacagccattgctctttcagttttgcctggctagcaaaagtggccttgtttatgtaaatcaagccccttagcagtcaaaatacaaaatctttcatctttcttttctccttttactggccttttttctccccccaccagacaacctttttttttttttttttttttttccatgacagtcttactctgtcacccaggctgaagtgtagtggtgcaatctcggctcactgcaacctctgcctcctgggttcaagcaattctcctgcctcagcctcctgaatagctggaattacaggtgcgcgccactgcgcccagctaatttttgtatttttagtagagacggggtttcaccacgttggtcaggctagtctggaactcctgacttcatgatctgcccacctcggcctcccaaagtgctgggattacaggtgtgagccactgtgcccggcccttttcgtgtgtgtgtgtgttggtggggagggacgggaaatttagccactccagaggccttgtttcccataatttggaacttctttaggattttatcaagtcaggtagagctgatcaaacccaatgggaaaaagaatgaaacaacaacaaaacagaaacaaacagcaacaacaacaacaaacagtgaagcaaaacaaacaatcgcgcagcttctatgatcactgagcgctctaatgggaaggagaaattaagagcacctgattgttaactttagccaaaacaaacccccagttcagctacttacctagggatgggtctcaggctcaagacaactctctaccatcctagaagcaggaaaaaaacctccttttccctattggatgcaagctcaaattccataaaggagttacctgccttccattgtcatggaagcaggaaaacttgccttccttgttggaaacaagtaaaactccaaaaaaaagggagttgtacagcaaaataaactttagatctcaaccaaatttggggagatcagggattctctagagggggtgctcccacacctcagcaaattgtcctattggtttgagccataaagttagctcacgcgggtaccaagcacccttaggagatttgtctaaggtcaggggcacctccactcagaatgcctctgtggttatcaaaatgtcaactccaaaaatttgagacaggtctcagttaatttagcaagtttattttgccaaggttgaggatgcacgctcgtgacacagcctcaggaggtcctgttgacgtgtgcccaagagagtcagagcacagcttggttttatacattttagggggacaagagacatcaattaacatatgtaagatgaacattggttcagtctggaaaggcaggacaactcaaagcaaaagcaggatgactcaaagcagggagggggcttctaggtcataggtagaaaagagacaaatggttgcattcttttgagtttccgattagtctctccagaggaggcaatcagatatgcatttatctcagtgagcagaggggcactttgaatacaatggggggcaggtagccgggcgcagtggcacacgcttgtaatcccagcacttcgggaggccgaggcgggtggatcacgaggtcaggagatcgagagagaccatcctggctaacatggtgaaaccccatttctactaaaaatacaaaaaattagtcgggcgtggtggcgggcgcctgtattcccagctacttgggaggctggggcaggagaatggcatgaacccaggagacagagcttgcagtgagccaagatcgcgccagtgcgctccagcctgggtgacagagtgagactccgtctcaaaaaaaaaaaaaaaaaaaaatagggggtaggtttgccctaagcagttctcagcttgacatttcccttaatttagtgatttcggggcccaagatattttcctttcacaaggtcttctgggaggggtgagatgtggaaagcgggccagaggggttccaaagtcacacccacctcccccagtgcagccagaactgctgcttccccccagaatttagaatcacggccagtgcctccctcggcttgtttctctaccccagctcattccacaacacacactgacatctggatggcacttgctatgtgccagatgcctggctaaggtctttgcatgtatttattcattgaatcttcccagcgatcctatgggggaggtgctgttatcattacaaagaagttaaagttgctaaagtgttacttgctagatctggcattatagagaaatatggagttagggccaggacagtatagagaggagtgggagtcaacaccaaagaggggaagaaaataggccccgctgtcagcattctgattccatggccggggttctcatttggttctgatcagtcacccaattcttttcctctgaaaggaggaagcaacctattgctcagggaaatagattttccaaaagctcaacagtgtttggttgggtttttttttttttttttttttgatatgggggctcactctatctatcacccacgctggaatgcagtggcgtgatcattatttgttgtattttttaactaaaaaaaattcaagtttcccatcaggtcaccaggaacaggatactttggcctacatcttttgttataataggcatttttaaaatacgtgttgtttttctgattatcaaagtcatacacattcattctcaaaatctggaaaagtacaggaatgcaaagtgaacaaaattaaaattacttgttactaaaaggataaatttgatggtatgtgaattatatctcaagaaaacaaaataataaaaaagggaaaacaaaaaaaattgtcctgtcaccaatgaaacctaatgaaacctaaacttccatcttgtcttatttctatgcttacctatatctttttttacttaaaagaaactcatgagtattctttttttttttttttgagatggagtcttgctctgtcacccaggctggagtgcagtggtacaatctcggctcactgcaacctctgcctcccgggttcaagcaatcctcctgcctcagcctcctgagtagctgggattacagacatgcaccaccatgtctggctaatttttgtatttttagtagagacgaagtttcaccatgttggccaggctggtctcgaactgccaacctcaggtgatccacccacctcggcctcccaaagtgctgggattacagttgtgagccaccacattcggccgagtatttcttacactattaaatcttttcaaaaaacacaatggctgcataatcatttactgtgtaacagtctgttgtagagacagacacgtggtcttatcttctagaaaaaatttgtcacaagggactttaatatagtgagtctgatggagaggatggtgtcctcaatatcattttacagcaaattcaataacacatttcatctggctgcttttgacctttaataaaagccagggactcaacattaaaatgccactccaaaggcagttcccggagggcactgccatccagttatgaagctttctggtggccagctccatcccaggataggatttaggctgccaagtgggtggatgcactgtgtgtctgtaaagcatctcccaccagcgggaccacatctcttttaagagcagacagagctggcctgggcccaggagctgggcttgggcattaggcattcagttaacaggcgttcctggcacccaccatgtgcagcacccacaggggcctggggcccatcccagcctgccaggtgctcctcaggccgggggaggagctcactgagccaggctgggggctggggtgggctttaggggtctactgaaggctatatgtacatgtacatgggccttaccccagaaaagaggtccaaaactttgctccaactctcaaaggcaatcatgaccctgaaagaagaagaacccctaaactgggggacatcttctgcgtgttggcttctttttttttttttttttacttatttatttacttttgagacagagtcttgttctgtcacccaggctggaatgcggcggtgcaatcttggctcactgcaacctccgcttcccggttcaagcaattctcctgcctcggcctcccaagtagctgggattacagtcccctgccagcatgcctggctattttttttctatcttttgttatgcctggctattttttgtatttatttattattattattatttttagtagagacagggtttcaccatgttggccaggctggtcttgaactcctgacctcaagtaatctacccgtctcagcctcccaaagtgctgggattacaggcgtgagccactgcgcccggccatgttggtttcttaagtgtccgtgcactcaggcctagagcactgcaggccagcagagcgtccagccactggccctggtttcaggctcagcctcagcttcctctttgcgaaaaacaaaagaactgcgattagatgctctctaagtttttaagattgtcttgagactggcctgcttccgccacttacaggctgtgtaatccttggcaaattgctcagcttctgtgagtctcagagttctatctgctttgtctagttttgggaaccagtttgggtctagttttgggaaccggagagagccgtgtgaattctcgggatagtagccctctcagggggcgcacgtgtgcttctgaagagcaaggtgttaagtgaccagtgaccactagggtgtgtaacaggggtgagcagacagcagggctctgcagggacttctacaagcagagccaggcctgagtggggctgccctgaagccacccagatggggacagcagggttgcctgtcctctgctctggcaggtactatgtgggcgacaccatggacgttctgtttgagaagtggttctactgcaaggacctcggcacgcagttggcccccatcatccaggagtgagcccccagcccagctcctgcctcttgctttcctggggctctgcatcagcacctgatgccctgggagaaagtctcccctcccagggtggagatcctggcccagagagcccactgccaggccggggggaggggggagcagcagccccgctgggagggaaaggatggcagacacacagctgtgtgagagccccatgagtgtgtgtgggcacctgcacctgaccgtgagtgtggtgtatgtgtgtgtcgctggccactccgatgggagtgctcgccactcctgctcctccctgttcgtccttgcaggttcttcagctctgagcagtacagaacaggaaagcccatccctggtgaggccgctgggaactgcccttctccttccctccctccccttccaaaataggatgggttttggtccaggggaccggggagtctctttttgaatactctgcccagtcctcaaggtactaagaagatggcagccaatggtacctcccacatggctgcttgatcattgagctggatacagagcctgttctggcaattgagacctggggcccctgggaactgggcccactggggctgggtgggctgggtcctgaggacaccgactatagtcatgctgtgggtgcagaccagctgctcaaggagccaccattccctctgagcacacgatccatcatggagcccatgtccctggatgcctggctggacagccaccacagggagctgcaggcaggcacaccactcagcctgtttggggacacctatgagacccaggtaatgtagtcctggggcatccggggcatcctcccacagcagccctggaaaatgggaaccagtctctctctcactgcctctctctctctttcacacacacactcacacacacacacacacacacacacatttcagaggttgtagacatgagcataggcctttgtgctccctccctgacgcagaaggcgatggctctgctccgagtgaagtctgtggaggctacatggtcccaagcaattttatgatctgaattcactttcagagttggaggttcccccactcactggcagcttcctgagggtctgcagttttcccctcgctaggaattcctgaaccttcagccagtcacagccttggaagccaaaagggagagagttgtttgggagtgagggttgggtggagagagggattcaaacaaggctgactttctttcattccacatttattaaatgcctgttatgtttcaggctttagtgggagagtaggatagagttgctaccttaaagaatgtatagtttgttaaagagatggacaagttaatcaacaattgccacaatcatgtgataaagtatcagatagaaaagctataggaagctatagaaggataaaggaggaacccactctgaaagggaagtcaaggaaggcttcctggaggaggtgacatgcacattgcattttaaagctagtgtaggagtttgtaaaagaaagaaagggaggtggagagagcattctaggtgagggagaagcatgagcatgagctgtttcaggcttgaaacagcctggcactgggagcagccgaagttggccagaggcggggcttgggggtgggggtacaagtgtgactggtggactgtggagcagcaggcagggcccaggtcctggtaggtctgctgggctaggcaaggtgggaggacttgtcctaaagacaacagccctccaccaaagtattgaagcaggggagtgacaggccagagtggtgtttctgtaccatgtgtggggacaaggctgggagggcaagagtggtgcagggagacctgtgttcacttgtgctttacggcttgccactggcacatcccatgggctttgaatgagtcaatctgtgcagggatgctcatggccacaggcttcccgtagaggcctggcctgctgctcttgggtaccagggacgtcctgagcttacacagggctgcgagaacatgcgcacatgtcacagcagtaccactcagccctgcaccccacctctgcaataccctgctcttacctgcttcagtttacattaatgaatatgcaccctctccagggcatcagcagcacggccctgcacagtagctgtgtgcttccaggctggtgcatgtcagagagccctcagcctcaccttccttgtcccctcctcctcctgaggccagactcataacctctctcagagaaagggaggtggcaccctctgggaagctgatggaaatgcgtccctcatgtgccctggtgagcatgccttcgcatgagcacacatcagagggaccacgggtgcactgcacgtgaaaggcaggcatgtgtgatcccaaatacctgttgcagcggcgggcacagggaggcctgcagcccaggcagccctcctctccaagtcctggtctctgctcagcacatggtgatggggctgtttcatgggccccaaccctgctccaagcaggcctggtgtctgggggccaggttcaagaccatctcccatgtggggcaagaagcaccagaagtttctgtttcacctcccaccaggtgatcgcctatgggcaaggcagcagcgaaggcctgagacagaatgtggacgtgtggctgtggcagctggcaagtggggcccagggacagggttgcagaaccccctgccagagggcatcagcccgctcctcggccctgggctcccacacggggcccactcttggggccttggggcccaggcagactcagacattcacccaggtgatgaggcccaacagtctccatttgattctcctgctcctcttctccaggagggctcctcggtggtgacaatggggggacggcgcctgagcctggcccctgatgacagcctcctggtgctagctgggacctcgtgagtacgcagggagggctttccctgggatcctcagggtccaactctgtgtgatccctgctcatctgtgtgtccacaggtatgcctgggagcgaacacaaggctctgtggccctgtctgtgacccaggaccctgcctgcaagaagcccctggggtgaccctcttgccatggcctgaagcagccacaggtgtgccaagcaccctcgagtgccatccctgccaaacaactgtcccagcccccactacctctctgtgtactgccgctgtgtcccccacagacctgcacattgttgtcacccaccctcctgcccttctcagcccagatgccatgcccctgggcgggcagcagctccccatcttctctggcagactcagcccactgccttgccagtcttgccaggtggtctacccccggccccgctcctgcccattcctctgtccctgcagactcagtgcagcacttccacaccaagaaggccctcaataaaggcttcctgaggaacgcacacctgggggtctgccgcaggcagtcatcactggccttcccatgtgccccccaggaccatgtggtgtgtctggggcatcagggcaccaggtgaccatggacgtgttggagggtctgttattgggcatccctgtttgtggatgggcattcttcactgtgtgtgtgacttgatccacgcatgctccatgcctggtcctgggagcacggctaatgtcatctctccacttccttctctgttctcatttattctttttactttttttttttttttgaaacaggatctcactgtcaccaaggctggagtgcagtggtgtgatcagagctcactgcagccttgaccctcctggctcaagtgattctcccacctcagccttctgagtagctgggactacaggcatgcaccaccacaccctgttaattttttttttcttttttgtagagatggggatttcaccatgttgcccagtctgtctttttacataactttaaaacactagcatctgttgagtttttttccaataacagaagtcatctgtgctaactatagaaaacccagaaatacacaaaatcccccacccagagctaaccactgttaatacctaaagactatgatcagcctggagaggggcatgaagttgtaccaggagctcagcagtgttggtgggggtgtctggccttgtgtccccttccctcccctgtcatgcacaggtgccctgttcaaagactccagagggacccctgagcctgctatgggtgtctagggatgctggaggcctcagaggcaccagtgggaagagacaagaatgtggaacctgcagcgggcgcagctcagtttcctgggacttccgtgagaagtcaatgagggcatgcacatgagagtgacagatctggacagaacaggtccctgcgtggactcaaagcttcctctagaaaagaacacttgacccctgtctccctcatccccagcccagtggctcactgccttcctacactccactgggagcagagaaagacctgcctttgctgaaaaggctactggccctaagagacatcgggaccttcaccctcctcgtcacccctaagggctttcctctcctgcaagcaaagaaaaaacaccatcaggctccttcaaacacaaatggtccaggataggcacaggcagaggctccacgcggctcgttcctggcctgtagcaatgcactgctccgtgcaggacctgagaagaagacatagaatgttccagggaggacccaggtcagaataccgatggccgtgaagagaagagtttactctcatatgcagggcaagcttaatccagagagaaagtcatgaaaattagatctgtttttgtgaacactcgctctgtcccaaggaatcccctagaagttttttttttttttttttttttttttttttttgagacggagtctcactctcactctgttgcccaggctggagtgcagtggcgcgatctcagctcactgcaagctccgcctcccaggttcacgccattctcctgcctcagcctcccgagtagctgggactacaggcacctgccaccacgcccggctactttttttgtatttttagtagagacggggtttcaccgtgttagccaggatggtctcgatctcctgacctcgtgatctgcccgcctcggcctcccaaagtgctgggattacaggcttaagccactgtgcctggcctataagtttttacataaattatctcattttatcctcacaactctccaagaaggtggtagtgcctgattttacagatcaggctcagagaggtttggaaatagggcagctctgtttccaacccaggcctgtctgcatatggagcttaggctgggcctcaccaccctgcttctcccagggatgtttgccctcagccttgaccaaatgggagcccagggcagccaagagaggccaggggccactgtgcctgggacacagaggccaggccacacatggcagactgctgaccccagccagttggcagtgatggggtcaggccctggagcctggaaccagcacctcccttggccctgctgtcccgggttatcaggagcctgaagccctcatctccacccacaggaccagcccatgggctcatgagaatacctcaccatgggacagctggacttgtaccttgtctggagctagccccagcctcccactccctattccgcagtgaatgctaatgggggcagggagtggagtggacaaggagccatggggagacacagacagggaaaaatcaggattgttctatttgcgggagaagcccccagctccccgtgccatggcagtagaaatttggcaggggcgtccccgtccatggggcctacttcaccgtgtacccggacttgggaccatcacagacttcggaaccatcaggaacctgggagcaactgaaagctgaactacagtgggctttcagacacacagcaggctggcggagcacaaataggactggttccctccaggccaccagcagggcggtggaggtcttcactgactccctgcctacctctcaggacaatgtccttttggctccacagtccctgaagccagagctggtgggggcagggaggcagccaccagcctctatatgtagtggaggagggggtgtccagggagggctgcatgatcctgagagcccccacctcacccggctggactatcctcccacttcagggtttctctgggcttccatcttgcccctgctgagccctgcttcctcctctaccagcagcacaaccccgaggctgggctcagagacctcatgtggtgggatcactcagtaccccgaggcggagggaaggagggagggctgcagggttccccttggcctgcaaacaggaacacagggtgtttctcagtggctgcgagaatgctgatgaaaaccccaggatgttgtgtcaccgtggtggccagctgatagtgccaatcatcccactttgccctgagcactcctgcaggggtagaagactccagaaccttctctcaggcccatggcccaagcagcccatggaacttcataacctgagctctccatctccctctctctcctcctctgttctccctccctccttctctccctcaccctcctctgctccctctgcctttaccactgtgggggggtcctctggagggccctgccaccccacctcttcctcgctggtgtctgccttcctggcaccaatcctggccctggagtttgtcctgggcctggtggggaacagtttggccctcttcatcttctgcatccacacgcggccctggacctccaacacggtgttcctggtcagcctggtggccgctgacttcctcctgatcagcaacctgcccctccgcgtggactactacctcctccatgagacctggcgctttggggctgctgcctgcaaagtcaacctcttcatgctgtccaccaaccgcacggccagcgttgtcttcctcacagccatcgcactcaaccgctacctgaaggtggtgcagccccaccacgtgctgagccgtgcttccgtgggggcagctgcccgggtggccgggggactctgggtgggcatcctgctcctcaacgggcacctgctcctgagcaccttctccggcccctcctgcctcagctacagggtgggcacgaagccctcggcctcgctccgctggcaccaggcactgtacctgctggagttcttcctgccactggcactcatcctctttgctattgtgagcattgggctcaccatccggaaccgtggtctgggcgggcaggcaggcccgcagagggccatgcgtgtgctggccatggtggtggccgtctacaccatctgcttcttgcccagcatcatctttggcatggcttccatggtggctttctggctgtccgcctgccgctccctggacctctgcacacagctcttccatggctccctggccttcacctacctcaacagtgtcctggaccccgtgctctactgcttctctagccccaacttcctccaccagagccgggccttgctgggcctcacgcggggccggcagggcccagtgagcgacgagagctcctaccaaccctccaggcagtggcgctaccgggaggcctctaggaaggcggaggccatagggaaggtgaaagtgcagggcgaggtctctctggaaaaggaaggctcctcccagggctgagggccagctgcagggctgcagcgctgtgggggtaaggtctgccgcgctctggcatggagggacaaggccagcacacggtgcctcaaccaactggacaagggatggcggcagaccaggggccaggccaaagcactggcaggactcaggtgggtggcagggagagaaacccacctaggcctctcagtgtgtccaggatggcattcccagaatgcaggggagagcaggatgccgggtggaggagacaggcaaggtgccgttggcacaccagctcagacaggggcctgcgcagctgcaggggacagaggccaatcactgtcacagcagagtcaccttagaaattggacagctgcatgttctgtgctctccagtttgtcccttccaatattaataaacttcccttttaaatatatttatttgcaagaccaaatatctgtctttaattctaacctgggactatcagtaggcgtcaaagtgagcgccccaaggtgaagggaaacttgggagagagtggggaagccatcccacagccccatcccagggggcactgtccttcccagaacttctgggaagccccggcatgtcctgaaaggcagaactgctttcctgggtgaggcctcaggcaggccaccagggctccaggccctcgggtacagagtttgatgctggggacctaacatccctccccagttccctcaatccacttagcccagccctctcatatcatggacaggacgcaccccagctactaaagtcgtcaggaatagaagtgaaagcccagaagtgtcacacacagaccaggagggtggcatcaagggtccatgtggatgctggggagggagcgagagaaaaagtatcaggcagagggaggtgggcccgggaaggatgagcaggtgagtaccagaccccgcctccaccgtgtatctccagcccacttccctgttctgaaaatctacctgctgcactcagaaacctaccaaggtactggggtgccacctgggccccccccagggttgctcttctgtctctcggctccccatgggcccctcttgccccctcaactcctactgctcccttttactccctggagccacgcctagggggtccctgcttctccacgccctctgtcaccacagggaagggagtccaaccctgggcggggccacctcagcctgagtcaggtcttttaggaaaggcctgcacactcctggaggatggggactgagcagctccttcgggtggatccccacctggggcgccaacacttaccgccagctcaacaccaggcacctttcctctggtaccatctctgcccctgaatgcgcccacctgggctcagggcagctccacgggccatttcctcaatctcctcttccctggacccttctcctaccaactcctccctcaagtcctcgcacctctcccagcacctgccctcactccttcatgacctgatggaagggaaatggacagatactcccatggtttgcaggcatgtctgcagtcctgtcttttcccatcaagggagagagcagaggctgcccttgaggagttcctgggtagatgctggtcacagggttcaggcccgcactcctaacctgccctggattctccttgctccccatcttgaccctgaggactgcttcctcactgacagtctgggtcacaccacccttccccgcctttccatcatttgcaaggccttctctaaacggggttgggtgctccctcgcgaagcaggcttcaggctgccgccacatggaggtaggactgactccctggtccgaactatggccccagcccactgtacccttctctggacttagttctccatctgtgaataggaatagtaatcctggcccttgcccagctccaggggctggggatgggagtaactatatgcccagagcacttggtgaggaaggcagttattatgtggagcagggaagggagaaggaagaggagtgggaagagaaagaaaactgtgtttaagtgtagggtttcctagagatggagtagtaccccgtggtggtataatgggagctgggggcaggcggagaccccatttcctacatttgggttctaaatggcattttggtcccggggacaggctgcactatccagtgtgaattttgggcagcatcttccacccttttttctcttctttctcctaacataatctgctgcccccctgagagaggatcagatggcatgcattaccttcctccagggactcctgagcagggggcaagcaggcagggctgggtgacaggccagcagtcattaacttgccagtgcttactgggcacctgccgtgggccagacactgagctacaaaggcagacaactgtactctcactttgagctccccccggccaagccggggagagacggacctgcaaatggaaccagcgcaatgcaacccagtgcaggccagggtcttttaggtggtgatgcaccctgagagcagaggcttgaagagctgactctgcctgggctgtcaggtaagtcatgcacataagctggatctcagaggatgaggaaggagagaaaagaatggcatccctggcactggaagggcatggccagcgcatgcagctgtgagaagactcagtgtgcaggggtgtggggaggagaccactgaggcaagagaggaggaggcctaccacagagctaggggacaggcaggaaaggcaggaaggaccagatccagaagggccctggtgccaagcccaggagtctgggttgatcctgcagacagtatggcaggagacgggtgtgtgcacgaggttgttaagtggaagatgatgattggtttgcattttcatcagttactctggcaagagcatgagggtaggggacgtgggagatgacctatgtctgtattccaagcaaaggcctgaagaaaggcagcagcagagaccacggagggtccaaatggggaggctgtgtgggggacacactgaggatgcaggtggtggagcaggtttggaggtaaaacaagttgtaggggcttggaagacacccaggcaaacatgtacagtagcacacttcggactggagatagaagcaagggtcttccactcaccagggctatgggaaagaatgtggtcatctggtgagaatgaagagaatcaagaaacatcctttaaaaaaatccctgcaagtaagggacacatgtaggaaaacccagtgaaatgctcagaaaaaaaaaaaaatctttaggaaaaaagcaggactgcagaagaaaagaagtcaaggcaatcttcacccaagtaagagattgcccattaaaaaggacagaatcaagccatcttttatgaaggtaaaagccaaacataaaatacccagacagtctgcaaagtgcctcctgcaagaacagagcattttcaaaagtgtttcctaattacatattgaagagagttgatctgaaaaccagtgtccatgtctgacactgtctggtcaatgaacaccctggatggacaacctggattaacaatgcactgtctgggtctattttttaaaagcttttcaaaaagtgataggttgtcattgtatgaaatttaataatatgcaaaacatgctatcatttatggattcatacatacgcattaattgtataaaatcatgtatgggatgataaacactaaattaaagagagtacttactgctgagatggaggaaaaatgggaagtggcacacaggtgatttactactagatctgaaattaactttgtaaaaaaaatctgaaaaaacgactatgaatgacatctgcatgttacttagcattgctttgggtagagaataaagggattagtgtaacgaatgaagaaaattcatatggctacaacatcttcaaatgctcaagaaagctcaaagaggatgacttaagaatagcattggatttaacaattagaaggtcattaaatgtgactttattgacagcaatttcagtgagtggatgggggtgggggcagaatggaagccataaagtgctataatgggttgaggaattaatgagatttgaagtaatggagacaactcttcccctttcaacaaatgtgccagtaaaaggagagaagataatagctttagatgaaactaagcagaggacagatgttttggtggtttgactgttctgttatttggtggattagatgaagagatttttaaatacaggaggagaagggagaaaagaaaaatactggggaggaggggaatgatgatggggactggaatgtaccaggccttattctaagcattttacacatattaatttttttagtcctgatgagggagattccattattatcccattttacagatggaaacactgaggcacacagaggttgaataatttgcccaaggtcatccagctagtaagtggcagtctggcctgagtcaagacactattgcaaggccctaagggagtggaaggatgaatgcagctcatgggtggcaggagggtctgtccccagaagatagaaggatgcctctttgagctggagcaatggcactatttcagtaggtcttgggacaaggggaataaagctgaagggattcttagaagccgcagctctcaggggataaggacttaaaaagtggcaaaggattggaacagctggttctggaaataagaaaatcaagctcccaacgaagaacatagaaaagggtcactaagcaagtggctcaaaggggcctggtgagttaagcaccctgatgagttaagctgtggggtcgtgagtaggtggtgtggttcctccagcaatctctgcacccaggagcagaatcagaataaacagagggtaaaacctacccagggaggggcagaagaaacctcctaggaagtccgatgataaaaacccagtcctggtatggagcttaaggtcggcccccttgagaggtatggcatgcaacactctaagctacagaggagcttccagaaagagggaggtgatatttgagttcgcattaaaagccttaatttaaaacaaaaaacaaaaaaacaaacaaaaaaaacactaagaaggctgggcgcagtggctcatgcctgtaatcccagcactttgggaggccaaggagggcaaatcacctgaggtcaggagttcgagaccagcctggccaacatggtgaaaccccgtctccactaaaaatacaaaaattagccgggcatggtggcgtgcgcctatagccccagctacttgggaggctgagacacgagaatcgcttaaacccagaaggtggaggttgcagtgagtcgagatcgcgccattgcactccagtctgggtgacagagcaagaccacgtctgagaaaaaggaaaagaaaaaaataagcttagtgtctccttttaagaaaatctttcagaaagcccagcaaacaagagtcacaaacatgtgtacttcacaaacacaggctggaggggtcccaagggagccaagcttcactttcccctataatgaccttggcacagcagctgagacagagtccacacaaacagccagccaaacagcaaaccccatgttggggcacagcagccttcctcagtgcaccacctgaacaccccagcacccatccccacaacccagcactggccacagcagggcacaagtcacactgcagggtagttcacgggaaaaaggctgcctattacacctcatacctccaggcctgggggcacagggtcaaaggcctcctactggggtgaccttgcctcgtgaaacttccatgtccccaggatgtggcttatgagacagcagaagaagatgcagaccctggggaaaggcctctgagagtctcagtgcagctggg

SEQ ID NO: 232 - DNA, 1585 bp, Homo sapiens
caagcgtccaggaagggtctggattctttgtcctccgccgggagcaggccccaccgcaggcgccagtgtgtggggcgccccggagacggtggcggggaccgagcccctgccccgcggagaagcagggggcgcgggacgccgttccccagcgctgccgccgccgcgctcgccagggcctggagtggcgcggagggcggcgggctcagaccaaagtccaccagggggcaaagtccgcgggccccaagcccccaccacggggtcgcgggggtttgctccgcctcgtgagcttgggattctggttaaaaaggcggctgggcggagctgcgggcctccgacggcgggaggacagcgctgcgaggaggcgcccgggacagtcatggagcgccgcctgggagtgagggcctgggtgaaggagaaccggggctccttccagcccccggtctgcaacaagctcatgcaccaggagcagctcaaagtcatgttcatcggaggccccaacaccaggaaggactatcacatcgaagagggtgaagaggtattttaccagctggagggagacatggttctccgagtcctggagcaagggaaacaccgggatgtggtcattcggcagggagagatattcctcctgcctgccagggtgccccactcaccacagaggtttgccaacaccgtggggctggtggttgagcgaaggcggctggagaccgagctagatgggctcaggtactatgtgggcgacaccatggacgttctgtttgagaagtggttctactgcaaggacctcggcacgcagttggcccccatcatccaggagttcttcagctctgagcagtacagaacaggaaagcccatccctgaccagctgctcaaggagccaccattccctctgagcacacgatccatcatggagcccatgtccctggatgcctggctggacagccaccacagggagctgcaggcaggcacaccactcagcctgtttggggacacctatgagacccaggtgatcgcctatgggcaaggcagcagcgaaggcctgagacagaatgtggacgtgtggctgtggcagctggcaaggctcctcggtggtgacaatggggggacggcgcctgagcctggcccctgatgacagcctcctggtgctagctgggacctcgtatgcctgggagcgaacacaaggctctgtggccctgtctgtgacccaggaccctgcctgcaagaagcccctggggtgaccctcttgccatggcctgaagcagccacaggtgtgccaagcaccctcgagtgccatccctgccaaacaactgtcccagcccccactacctctctgtgtactgccgctgtgtcccccacagacctgcacattgttgtcacccaccctcctgcccttctcagcccagatgccatgcccctgggcgggcagcagctccccatcttctctggcagactcagcccactgccttgccagtcttgccaggtggtctacccccggccccgctcctgcccattcctctgtccctgcagactcagtgcagcacttccacaccaagaaggccctcaataaaggcttcctgaggaacgc

SEQ ID NO: 233 - protein, 250 aa, Homo sapiens
MERRLGVRAWVKENRGSFQPPVCNKLMHQEQLKVMFIGGPNTRKDYHIEEGEEVFYQLEGDMVLRVLEQGKHRDVVIRQGEIFLLPARVPHSPQRFANTVGLVVERRRLETELDGLRYYVGDTMDVLFEKWFYCKDLGTQLAPIIQEFFSSEQYRTGKPIPDQLLKEPPFPLSTRSIMEPMSLDAWLDSHHRELQAGTPLSLFGDTYETQVIAYGQGSSEGLRQNVDVWLWQLARLLGGDNGGTAPEPGP

SEQ ID NO: 234 - DNA, 1638 bp, Homo sapiens
caagcgtccaggaagggtctggattctttgtcctccgccgggagcaggccccaccgcaggcgccagtgtgtggggcgccccggagacggtggcggggaccgagcccctgccccgcggagaagcagggggcgcgggacgccgttccccagcgctgccgccgccgcgctcgccagggcctggagtggcgcggagggcggcgggctcagaccaaagtccaccagggggcaaagtccgcgggccccaagcccccaccacggggtcgcgggggtttgctccgcctcgtgagcttgggattctggttaaaaaggcggctgggcggagctgcgggcctccgacggcgggaggacagcgctgcgaggaggcgcccgggacagtcatggagcgccgcctgggagtgagggcctgggtgaaggagaaccggggctccttccagcccccggtctgcaacaagctcatgcaccaggagcagctcaaagtcatgttcatcggaggccccaacaccaggaaggactatcacatcgaagagggtgaagaggtattttaccagctggagggagacatggttctccgagtcctggagcaagggaaacaccgggatgtggtcattcggcagggagagatattcctcctgcctgccagggtgccccactcaccacagaggtttgccaacaccgtggggctggtggttgagcgaaggcggctggagaccgagctagatgggctcaggtactatgtgggcgacaccatggacgttctgtttgagaagtggttctactgcaaggacctcggcacgcagttggcccccatcatccaggagttcttcagctctgagcagtacagaacaggaaagcccatccctgaccagctgctcaaggagccaccattccctctgagcacacgatccatcatggagcccatgtccctggatgcctggctggacagccaccacagggagctgcaggcaggcacaccactcagcctgtttggggacacctatgagacccaggtgatcgcctatgggcaaggcagcagcgaaggcctgagacagaatgtggacgtgtggctgtggcagctggcaagtgatgaggcccaacagtctccatttgattctcctgctcctcttctccaggagggctcctcggtggtgacaatggggggacggcgcctgagcctggcccctgatgacagcctcctggtgctagctgggacctcgtatgcctgggagcgaacacaaggctctgtggccctgtctgtgacccaggaccctgcctgcaagaagcccctggggtgaccctcttgccatggcctgaagcagccacaggtgtgccaagcaccctcgagtgccatccctgccaaacaactgtcccagcccccactacctctctgtgtactgccgctgtgtcccccacagacctgcacattgttgtcacccaccctcctgcccttctcagcccagatgccatgcccctgggcgggcagcagctccccatcttctctggcagactcagcccactgccttgccagtcttgccaggtggtctacccccggccccgctcctgcccattcctctgtccctgcagactcagtgcagcacttccacaccaagaaggccctcaataaaggcttcctgaggaacgc

SEQ ID NO: 235 - protein, 302 aa, Homo sapiens
MERRLGVRAWVKENRGSFQPPVCNKLMHQEQLKVMFIGGPNTRKDYHIEEGEEVFYQLEGDMVLRVLEQGKHRDVVIRQGEIFLLPARVPHSPQRFANTVGLVVERRRLETELDGLRYYVGDTMDVLFEKWFYCKDLGTQLAPIIQEFFSSEQYRTGKPIPDQLLKEPPFPLSTRSIMEPMSLDAWLDSHHRELQAGTPLSLFGDTYETQVIAYGQGSSEGLRQNVDVWLWQLASDEAQQSPFDSPAPLLQEGSSVVTMGGRRLSLAPDDSLLVLAGTSYAWERTQGSVSVTQDPACKKPLG

SEQ ID NO: 236 - DNA, 150830 bp, Mus musculus
  misc_feature (1)...(150830): n = A,T,C or G
cctgacaaaacacatctcttaggtttgtgtagctgccacctgccatctccccaaagagattgaatttgagaggagctatctctaggttagctgccaatttgcagaaatcagaggactgcattgagttagacagaggacataccaggaataaacaaacacaatatcctggttgaagaaaactctgcaggtcagatgggccagagttcctcactagagataaagggataaagacagattaaaggaagaaatagtgtaagatacctaaaaggcattggaaaaatgatgtggctgctgccctgtctagtaatacttactcatttgctaaagctattgaagagtctgtgaaagtcacagtagtgtttcctcagagtctgataggaagttatggttgggatgaggtacacggatagatcttctggccgggaagcttagttctcttttcctcatgataagttcaagcatggtcactttctataacttactaactgtatatgtatacataaagtattttttaaaaaccaaaaaccaaaaagtcgttatataacatttaagtattacagaaaagattaaattatcctttctcttcatcttctgttctgtgtagtaatgtatataagaacttaaataaaaaacaaaattaaaaaataaacaagtgaacaaaaagcaaaagccaaaacaacagcagcaactaaaacccaacaacacggagctggagagatgctcagtggctaagagcacaggctgctcctctgaagacctgggttcaattcccagcacccaactccagtcccaggggatcctatgccttcttctgctcttttggacactgtgcagatacacacacaagatgtaaacactcacacacataacatttttaaaaattaaaaaacgaaaaaagcagaaaactaaaaacaaaactttgtgtgaataagatgtctcagtgggtaaagcctttgccaccaagttagatgacctgggtttgatgcttgattccttggcacacacatcacatgatgggagaaaatggagtcctataagttatcctttgaccttcatgtacacactgtagtgcatgcgaacacacacaccccaaaacaaaacatggggacctgtttagaattctccttttaagaattattctgcttttgctggggtaatttttttatttaatactggtgactaggaaaagtcatagctttattgtttaattagtatttctgtttttttttttaccttggacttttaggaaactaaaaggaaactaaattttgttttgttttgttttctgtttttgtttttcgagacagggtttctctgtgtagccctggctgtcctggaactcactctgtagaccaggctggcctcgaactcagaaatccgcctgcctctgcctcctgagtgctgggattaaaggcgtgcgccaccatgcccggcattacttgggtgttttttaagtagaatttttgacttctgtgtatgtgtatctgaatatgagtacacatgggcccctgcggaggccagagaggacgtctggctagagttggaagtggctgtggctcatccagtgtaagttctgggactaaacccagatcttctgcaagagcagccggggttaagatggcacatggctgagccatctccccagactctagggagttaacttttatcaagacagaatttatagacaacttgaacgagatagttaccttttaaaaggggaattcgataatctgaaaaataaaagattttggtgaaatacagagaagacacagttttaaactgttttaaaatttattttagttttatgtgtattgtgtgtgattatatgagtttatgtacaccatgtaaatttatgtgcctgtggagctcagaatagggcagcagatccccggaaccaggtttatagatggttgtgagcctccatttgggggatactgggaagtgaacctgggtcctctgtaagagcaagtactcttgactgctgagtcatctctccagtcccagagttttaaagagacagcttattttctgagcggttgatggcatttcaccaatgcattcttaggaatttaaagctttttatataggaaagtgttcagctgtagtacagtgtagctaataacagagagctgagctgatgcatctcttcctgtatcatgaagttcagaggcagatgatccagaaatactgccctcagtgtgggaccactctgcatgctgctttagcatttatatcatgctggtgtctatccatgtgtttgctacctcctgtttggcagatatctattgcagctgcaggcatcaagtgggatgatgggacaattgtgttttcatcagaaaaagctaacagaaccccgggcatttgtgcctgtggcccaggggcctgaacactctccagggctgcctttagttggaaggaagatggtggtagcaaggatcctgcttctggctaagcatatggctgacaaaagtcagtattgttcccagatatggaggacagaggatatttaacttacagtgtctctgtctgagttgaagaattcacattactggaggctaatgtaatatgtaaaaaaaaaaaattagcaactcaaaattggtcagtttgaatgctgtgtcagcaaggttctaattaatgtggtatacatttttcacatagaccttcaaagctctctaagaaaaattgtgttttggagtacagaggtgtcagtggtgggaaggggcaggtgatggtgtcacaagatgtgccagagatgtagatagtaaggttaagagtattaaaaaggaatctatatagagaatatgtactgggcttagactttctcctcatgttcttctaaactttatgacagcttatcaggtatgagttattaacccccccccccaaaaaaaaaagctgagtttctgggaggttaagtaatatgtctgagatttagttgcctgggaaatgttcacgctagaactagtgaggtctgcctgatcccaaatcacgtgctctttgtatggcaccagaccctttaaaatgtgatgtttgctctcccctccaccccccaatagatgacctactgcagactgttgagagtacatctggattagctgttattcttttcattaagaccatgttccggccatctgaaaagcttcctggattggtgagtacatcttctctttaggattttccttcactgtgacactttagatggacatcactttttacaatttaaatattttgtttgttaatttatagttatttatttgtggcgtgtgtatgggcacacgtgtgtcatggtgtgtgtatgtgtgtctgtgtttgtgtgtgtgtgtgtgcgcgcgcgcataggtcagcggaaagcttgtggttgttagtttgttccttctttcatgtgggtcctgaggaccaaacttgggttgctagatttgacatgtctgtactcactaagccattttacttgtccgtcaatttttaaatcacattagctgaattttaaaatttatttagcatagttgggattttaacaataggtcttttctcttatgatatttctaaatataaaagtaaagtgagggcagggaggacaggctgagcagagctgcctggaattcagctgtgcagagctaactgctgccagcatgttagggacttgctcctgagtgtttctagggctggttttagatctgtgtgtcagtgtggtaagcgatgactgacattagaactatggaggggccaattaaatacactttaataatattctgaaagtttttttttaaagagtaaactttgcaatatacttaatcatattctttgtaatacaagaggcatatgagggtcaatttctctctctctcttttttttttttttttggtttttcgagacagggtttctctgtgtagccctggctgtcctggaactcactctgtagaccaggctagccttgaacccagaaatccgcctgcctctgcctcctgagtgctgggattaaaggcgtgcgccaccatgcccggctgtgaatttgataatggaaattacatctttgtaatggctgctaacggtctcccctcctctcagtatattatctagaaactcactctgtcttttagcccagacttatattaaacatgtctgtgttctgagatcatgcacaatcattatctttgaatacaattgagttttttctcagagcatccatcttcctctctgcctcatatgctgctcttccttccatagccgggagacgatggagagcttagagcgagttgttctcactttaaagttaggataataatttcagtgcttgtgctgtttcattagttttcctagaatattcaggtttgtatttgagatattgtatataattacgtcttgttttccagatcagcagcttgcttctccggtctgctgagtgcactagcatccctgagtggctcatgaatagctgtaggagcctttgctgtactgatgtgccagcctcaactctcttattcctgtgtcagggaacacttgctatgctggactggcaggatgggagcatgggccccagcggggaggctttgctcttggatatagtgcatgttttgttcaccttgagttcacagtgagttttggctttgttatctcgtattttgttttgcttataagacatttgaaggatacaactaagctaacaaaattaattcagttaaatgtggtaggataagtcataaattaaaatatgtgggaataaaataggcttgtgagaaaaagcagatgatgagaacagaaattactggtgcaggctgatgtggaatgaacatttctaacaatcagtatctatgccagctttctcttctgcttgttttgggtcagtcccatgttatttggaactttgtgaccaaggctggttttgaactcctgatcttcctgcttcttctcccataacaagtgtacactaccacactcaatttatgctagcattaaaaaaattatttttatttcattatgtgcgtatgtgtggtgggtattggcatgtgtatgaagtgctatggaggccagaagagggcagtgggtcccttcgtactagagttaacaggtgattgtgacctgcctggcatcagtgttggaattgaactttggacctctgaaagcatagtctgttggcttaactcctaaatatatcttccactcatgctaccattttagaaaacatgactctgtttcatgagtttcatgaattctaagtaatatagtgtattttatacaaacatagtgcagtttactggatggataaagtgaggttatacagtaagtgctcgcagctgagcatgctgtagtcaggtctcacagagctgagtttctttggtgttgggccattatggatgatgagcaagtatttaaaatgtcaaatagggtctggtgagatggcttagctgttaaaggttcttatcgccaagcctgaagatctgagtttgagtcattgaacctacatggtagaaggagggaactgactcttgcaagtttacttctgaccttggcacacatgcacatatgcaataaataatacataaattatagtaagttttttaaagtcagaccatgaatataacttaatagcagtaagcattactattatgataagaaaaaaagctctaacataatttttacaagttggagatacagtttacatactataaattcacaaatgtaaagggcacaactttgtgtcttcttgtatgttcatgggattgcacaaccatcaccacagtcaacctcagaatgttcctatcttcctagatggtcatgatggtacacttgggaggcagaggcggcaagatgagttggagtgtagcctaaattacccagtgagaccttatctctaaatattttcatcatcctaaaacagtagctaccccaagagtaaaacatggttctccagcctttctcagctgggccctcagattgttttaagatttctatgagaggccagggggatggtccagtggcacagagcatatgctgtgcaaatgcgtggacctgagttcagctctgcagccatacacatgcctgtaaccccagaactgctaagtggagacaagtcaatactgagagcttgctggccagccatcttagctgaaatagccagcttgtaggtcagtaagagacagtgtctgagggaaataagacagagctgtaagagaagacgccaggtatcttctcctgtcctgtgtgcatgcatatgtgcactcacttgaatgccccccatacccatgaaaccatcattacagtacagataatgaacatctcattttgtaaaggtttccttatattcatttgttttttattttataaagtaaaaatattcatgtgaaatttcactttcagtttggccttatttgtaattttgtttttgttgttgtaaatgtcattaaattttttgttcattctttgtatttaaaagtcatagatggggtgggggaagggtatgggggacttttgggataacattggaaatgtaaatgaagaaaatacctaatttaaaaaaaaaaagccgtgatactactttcttttactaggcagcttctaaccatacacatcatggtccacttttcttcaggattaaggagtccacattagaaatgttcctgtctagaatcctggcatcttggaccagttcagccatacagatccttgaatcaggctcctcaggcttaaagggtcatctgaacggggactcatgcgtacctaggagacttctggagtatgtctacacacactgggagcacccgttagacgctctgagacatcaaaccaaagtcatgttcaggaatctcttgcaaatgcaccggctcactatggaaggggcagatttggccactgaccccttctgtctggagttgactaagagtcttctgcagctggaatggcacattaaagggaagtacgcttgccttggctgtttggtggagactcttggaattgaacatattttggcaatagataaaaccattccatctcaaattctagaggtgatgggagaccagtcattggtaccttatgcaagtgacctcttggaaaccatgtttaaaaatcataagagccatttgaagtcccaaactgtcaccaatacctggatggacaagtggcatgagacttgggttttccctgtcctttctgtactgtgtggaggaaacttggatcagagatcttatgtgattgattattacctgccacggatactgaattacagccccgagagcctgcactacatggtgcacattcttcaggcatctactgatactggaactggtgagatagtttttgttttatgaatttctatttaggatacttaaatgtaagcctctgtgcagatgtttgtcatcttctagtttaaatatgtcctctctccccttctataagtggtaaagaaagctgttaatgacagccacttcagattgaaacattttactttcagtagcagagtggagtttttggctgaagtagtttcaaaaagccaagcagtgatttcagttgtaagtttttcttttgtgttttgctttttaaaaaagattgatttgggctggagaaatggctcagcggttaagtgcactgactgctcttctgaagttcctgagttcaaatcccagcaaccacatggtggctcacaaccatctgtaatggaacccaatgccctcttctggtgtgtctgaagacagcaacagtgtactcacatacataaaataaataaacctttttaaaaaaaaaaaaaaaaaaaaaagattgatttgtatgtgtatgagtagtttgcttgtgtgtctatatgtgcagcatgtgtgtgcctagtgcctttggagtcagaacaggccattgcatctgttggaatggagttacgggcagttgtgagctgccatgtagatattgggctactctcttggagagtagccagtgctcttaactcaagaactatattttccaccccttagttataaggttttaatctatttatttttttgttctcaagctagaggaatgctgtctgtattttatatatatatttttttatccaggtgattgagatagcaattaaaaatgctgtaggcaggcctaataaagcagatggatttttgtgtttagtaggaagcacaacttaaagacgaactatgtagtcatttagaattgggggaaacatcccactgagacttgattgctaaaggaatcgtgatttgtaattaatatgtggccatatgtggtagtacatgtctgtaattccagcacttgggagacaaaagcagatgattgcttccagttcaaggcaagcttagtatacacagtgagttccatacatgtcatgactgcatgaaactctctagatagattgatgaatgggtggatggatggatggatggatggatagatagattaaaattacccttttgataaagaaaaaatatatacccttacttgcaattgaagaaattttgaactattggctctgagaggaaattttggtttctttacacaaaaacaatctattatgtaatagtcttttaacagttattcttgcatttttgagcggccacttgaggcttcggagatatgagccgttctgatgctagcttgtgcttactttgttaaggtccctgtgagccacagcgtcccgcaccttccttagcggctgatgctatgctaaaatcagcaagtctctgtagtgcacatttgtgttctttataatgagaacaactcaaaaacgagttataggttagtctttttttttttttttccttcgagacagggtttctctatagctctggctgtcctggaactcactctgtagaccaggctggcctcgaacttagaaatctgcctgcctctgcctcccaagtgctggcattaaaggcatgggccaccattgcctggcttagtctttattttaaaggaaataatagtctttgaacaattacagtgtttctactattcttgtgaaattgtttataacttgtctttacctgatttatttttctctaattcacatatggtgattttttttgtaaatgttaagacctcaagtaaaagtattagagaataagttataatttctttaaattagtaagataattgtgcttacttggaattattggcatgagcaattatctccagtcatttttattttagaatagcactttaattcatgttagaatttaaagtttaatgttaattggatcataaaagttgacacgtcatagtcattgcatagcacaggaatagtctctgctcttatgcttttggaacaagaatagtcttttctccttttagggtcttgtaatcacagaggagctctgggagctttgatggcgtgtctccgaacagctagagctcatggacatcttcagtctgcaactcaggcctgggagaaccttgtgtgcagtgcaagggtaaagcaaggcttaattcaccaacactgccaagtaaggaaacttttgttgcatccatagttcctaataatctgattgctttagtagcccagctagaggcccctgagttgaacctagcactgtcaggagcctgttaaggagccagtagaatgtgccatccttgtactcagtctatgcagtgtctggtggcagcatagacagcttacacaaagaacctacagctcggagacacattctacatgtgagtgtgccctggtaagctagtttatctatctgtaaggcttacgagagcctgaccagggtgcatggtgcttggctgctgtgagctgaacgtggtctgtggaggcctgcagcaaggtagcacaagaagacaagaaagccgtggagcagaagctgcgggagtgaggctttgacctgtggacctgcgaggcctcagttttatccgtgtaatgagatagttttacaggatgtgatacaaggtgtattgactgagcaacctttttgaggcatgtgtgggtaacatggagtttacacagaattataagtattttagccttcttaatttcttagaaaaattaacgtattttcatgtattttaggtgcggatagatacactaggcttgctttgtgaaagtaatcggagtacagaagtggtctctacagaagaaatgcagtgggttcagttttttatcacttacaacctcaacagccagtctccaggggtgcgccagcagatttgctcactccttaaaaaggtagaattttgcatcagcttgggaaaatagtaattgctctagaaattactgtttaaaaaggtcccagatttgggaagagtgtgaaacagttgtgatattgggctaccacctgtcttcatggcctcagagttttgctctgagacaagtttacctgtcggattaaaatccagcacacagaattctttcatttgggtgttaaaaaaaaaaatcaaccctgacttcttaaaaaatataattttaaacattttattcatttatttaggggacaggtgtgtatcccatggtgcaatcatggaggttagaggtcagtttgcaggagttggttctctccatttgccatgtagatcctgggaatagacttaggttgtcaggcttggtgatgcacaccctaactcgccaagttgtcacaccaaccccagcttgctcagcgttggggttcttagagtgtaggtggtgtgaagaaagtgttggtgatgggggaaagaagcacccatgaaatggtaatctcatgagtagcttatctgaatcagacatagtgcatctatggtgaggaattggtaaggtgtaaaattgactatcattttgcaggttcacaccaatttaaaggaaatgggaaaactggtttaattctggttgcagtaatacattgtttttggtaaaactataaagtgttgattttatatgaaaaagaaactgcggatttcaatatttgaaaatccaggctctgtcttagccttaaattgtccttgcaggcggatgttttagtttactgtgtgtgtggcttatatatagtaaaacaaaaagtcctttctccttaaaagttgttttgcaggatacaagaaagttcacaggtactttataaattggaacagagaaaatctacacctgactcagagaacgggtccatcagagagcagccttctgtcactttacagcagtataaggtaggtgatgtacaagacatgcaggcctcagaaaacacacacacttgtgagtacggaccagagggcagcagacagaaagcccttgatgaattgtggctttgtgcttttttctcaagctggaagttatatattccttctgagtctgggcattccactggaggtagcctgagttgtagtatcaaggcaatacttgaagactgtgtcagaatgacgtaactgggctcacctcagtagttcacttcttgtgggccagtttacttttactcagacatttgggtagttgctgtctctaaactccacctcttcaaatggcacaaggtgctgcttggactgtggttcagattgacaactttcagttctgtgtgtgtgtgtgtgtgtgtgtgtgtgtgtgtgtgtacacatgtatgcatgtggaggacaaaggttgacaggaagtgtcttccttgattactttcccccttattttttgagacaggtttctcactgaacctggaacttgttgattgagctagagtggttggcagccagccccaagcatcctctcgcctctaatccaggactgattgcaggtgtgcattccaaccctgggctttgggtgttaccgatccaattcaggacctcagggctacacattcacttgccccatcctcctggcctcctgctgcataggtggccagggccacatagtgagctctgtcccaaacaaccaaaccgtacaaataaggcaaaattgctgaaacagacaaaaactctgaacaacttgattttgaggattaactgagaagaccctctttagccttcacttgactcaccaagtaaaggggcttgctgggcctaccatcttgagttccatgcctagaatccacctggtgacggcctacccatgaacattggcatctgattgcacggcacagtgatatgtactgcccatgtatgaaaacacacgtagtaaacaaataaattgataacaatttaaaaaaacccactaagatccattaaaagtggtttagagtatttaatgcgccctgccctgtgtgtgtgagtgagtgtgagtgagtgtgtgtgagtgagtgtgatgtttattagcctcccttagatcattgctgaatttgaggagaaatctcttttgtttctttctgaaaggagtgacatggcattcatgaactgtcacctccgcccttaggaacataaaaccttgtgtggattgagattctacattttcattaaagcttgtggttcggtttttgcttagggatcttcctttttcctttctttgaaacaaggtctcactatatagcccagggcggcctcaaactgggattcttctagcctagctttctgagagctgtgttatagttatggaaccatgccattagataggcattatttgaacattaggccttagaaacttaatctgagtccctctgtggtagagtgctttcttattatgcatatcgtcatctgttgaatcccagccgaggtgtggcgttgaacatgtggctatgtgggctacataaactagaagtggaagtgaatgcctgttgtctcagtgcttataaggtagaaacaggagcgtcaggaatagaggccaccctctgctacatagcaagttcagaaccagactagggtacatgagactgtcagtaacaaagataatataaactgacaaaggaatatttagctcttgtgagtatgtggaatattgctcatgactgggggccctatggtctaaatatggtctcttaatttattagtgttatactatagttgagagaaggaaccatattgaaaagtacaaatgatagtacaagtatagttagaataagtcttaaagacagtgtgaacattgttttacttcataactaaaatcgggttaaatagatacattttggataggcattctagtcctttgacactccaaagaactataaactcatcaccaaattcttagggttcatgagggccacaagatcaaatctcttaaggttgcacatctaccagaaaaatgaatgttgggtcttgtgttcttgactgacatttggggctctgctgccttccagttgctcagggtaaagcagtgccaggatgcatgatggtcagcactggagttttcagctcttctctgtagtttatgctgtttttacagtagaggaagaagagctgatgataaagcagtagccctttacttgctgttgagaagagggggtaaaaagtctcatgtagcccaggctagctcaaacgcagtatgtctcataagatgactttgacctctgattcatctgcttctgcctcccaagtgttgagattacaggtgtgcagcatggcgtctggtggaaatggagtggagctagaactcagagctttgtgcccacttgggaagcactcttcagagttgcatttccagcagccatcttgcttttttgattaaaagttttctttaaagaaaatcatttgtagaagtagaatgggcgagagtatgaatctcaggaggcaagtagagaacaatctttggattaattgtatcacagtcaatttagtagtctttcttggctgtttcttgtttactctcaaactttggaaagttgtatacctctgatgcctgatgtgcagagaagtcaggattcataaagccctgctatagacagggctgaacaaatcttgttctttctaaaattatgttgttggtttatcttgttgagtctgtgaagacagggtttattaaggtcatgatgtagtttgtgccatgaatactgtccattttatgctgctgtatcaagtccttggggagggtgctttgaaaggatctaggttatgaagaagaatattagtggccagaaagaccaaacagcagagttaagggttcgctgaccatgccatgctatagcagcgtggtgggcacagcatggaaggagcatgtggtcaggagtgaaggcagtacagctagctgagaaaatagacctgtagcatagcactcctgccgtggaaactaatagtgtgattcactcctttgcccagggttggcgccctctagacctaattaccttccaccaggccttgtctcttaaagccctggcctcccacctatgttaccccactgggggtcagacatgaagcagaagggataaactgtccaaactgtaggaggtgtcaagctgaagagtcagacagctaggacagctcagcagccttcccctgatcagatagagcaggcacatttacttctgaaggaacccagctacccagctgctgttagcttaattatccttaactgtaactgttcttcattttagaatttcatgtcgtctgtttgcaacattctctttgaagcattgtttcctgggtcttcctactcgactagattttcagctttaactatcttaggatcagtagctgaagtgtttcctgatccagaaggtaagcatcagcaacgtcgggaaacatacactctgttagcatattgctgtacttgacatttggattttattgtttctatatagattcccttttaatacatagctctcatttgtgcataattaaagttgctagtgaagggaagtgagagagagagagagctgtctcctcctgtttgtcactttccaagcgcatactaaacctgggtccttggtgtgggtcttcttgctcaccacaccaagactgcctgatctctcctgccatgtttatttgtgctggtataagtaagggcttcatctcttaagtttaaaatgaaaaccataatggcttatcttgtatttaatatataagatgaatgaggctttgtggttaaaatgtggtttctcatatatgccatctgcttgaagatttctacacttttagaaatcacataaaataatacaaaaatcattacataccaacaaattaaattatctatatgaaatgtacattgattctaggaaatgcttttaaatcttaaatatatggtccaagtccacaccattgagctctgctttttaaactgctgcggtggcagtggaggtgtgagaggcaggaggtttactgcaagctcattggtaggttccaggtatgtggtctccgtagttcctttgggtttgtaatttttgctcaaaacctatcacttttcacatttttaaagccatagtacttggttgtcatttgaagagatacagttctgcgattgtgcatagtgtatgttgtgtaaagtacaaagtgaaatcttaactgtagatgaagcaggaagtatgaatttttgtattgctcttatataaatatttggccatatagctttgggcagtttgatttttgtttatttaaattttaaggtaacatccaaacagtgtatcagctgagtcatgatattgatgctggccgttaccaaatacttatggagtgtttcactagtacttttgaagaagtgaaaaccttagcatttgatcttctgatgaagctgtcgtcagtaacagctggacagttccaggtatttggactttatctacataaatgtgtgtgaatgcagaacttttactttaccttagggaaagcagtcaggattgtcccagctctttgccttctacatcttttggatatttattgcagttgctatctgtccttgctctttcgagcatgggaaatggccaaatccacacggcagtggggttgtgggaggcaggaggtttactgttgtcaagctcattggtaggttccaggtatgtggtctccgtagttcccttgggcttgtaattcttgctcagaacatatcacttacagtcattttgaggttttaaagataatctcccagactagcagaccaagaagctgagtgtaaataaggcagacaatgtgctctggtcttccagtaagcagtagctaaaccgagactgaaacctgagaatctttgaggttagctgcagttctctgctgacacctcagccctcctccacctgacactactcttcctgccgtggcaggagacaaagattgggtaggggtatagagtgagtatagagtgagtatagagtgagtatagagtagagagtgagtctacaggggaaccctagccaggttctcttcctttccttttatcttactctggggatgttgggtcagcagggacatagagggtgttgaactttgtttagccttttattaacactctctagaggccaagggtcctgtggggactgcagctgttaggtatatttagggtatgaaggtacagcctgacatcattttataggtgtaagattcagtggagcagagatgtacaagacagcagtgttgttgcttctgtggtttggtatggcattgcagcatcttagggtgtcactgttctgactggttccaggttaggagttgttgcctgtatccataatcttttcaggtaccttagtgagcagaaggttcttggtgctcactgctaaactcttgtgtcctataagaatttaatttagattttcttctgtctgcaccatttcctttactggttatcacatgcagccttttctcatatagattagctatgcttcattgattattcaaatggtttttgagaggatctgcagtgagaaagtaaattattgagaggcctgcttcttacagaccctgtgcagggcctggagaggccctgtgtgcctttcatctgtaaacatgtgcttgtcccagaggtactgtagcattagaagaaactttgtctcacatgggtgaagtcaggatcttggttacagtatctggtcttgttgcatgttagtaaaatgattgacataaacatttaagacttgaaagtagggcaggcaagatggttcagtaggtaaaggtgcttgtcaccaagctttgtgacctgggttttttctctgaactctacatgatagagggagaaaaacagttcttttcgttttcccctgacctccaagtgactactatagcctgtgcatatctctttcatctccctaccaccccccaaaataaataaataattaaaataaaagaattgatcacctcctacttaaaaaagacctttaagatatggactctgtatttccctaatttttgaacagtgcctttaacactagcttaacagctgtgtatagcgcatgtctgcgatggcgtggctttttgacacatgtccttactactcatctgatttacttcccatctttttaaagatgtattcatttattatatgtgagtacactgtagctgtcttcagaccctccagaagagggcatcagatctcattatggatggttgtgagccaccttgtggttgctgggatttgaactcaggaccttcggaagagcagtcagtgctcttaaccactgagccatctctctagcccccctacaaatctatatcttaatggtacattaatattttaagtttttgaattacattttcatgtatttttttttcctatgtgacactgtacgtatgtatgtgtctgtgtgtcggtcaaaggacaaatgattcaagttgattgattcttcttcccccatgtaggttacagttgttaagcgtggtaccatatctagggttcattgtattaatattttgatctaagtggaataaaagtgttctcagttttaaggctgtttattttgcttcttactgatttatagggagggtagtttaagatttactctaagccggacgtggtggggcacgccgttaatcccagcactcaggaggcagaggcaggcgaatttctaagttcaaggccagcctggtctacagtgtgagctccaggacagccagggctacacagagaaaccctgtctcggaaaaaaaacaaaagaaaaaagaaaaaaaaaaaagatttactctaaggtcaagtagtaaaaaatttagagataaactgacattacagttagtacacttgcaatctactgttttgaaattgttagtcaccattaaatgtcattgtactaataatcaaattcagagataagtttttaactctttctaatagatagttatgggacaatcaaaaacgaatcataatattgatcaactaaacactgatgttcagagtactgagcacgtggcttgtcagctgtgtgattgggactgggatccttgtgtcttgttgccaatccagtgactttccctagttgttacagtgagttttcccttgttctgttttcttacttataacacactgtaggaatttggatgccagatttctgaatcttatctggtcctctgttctccactcatgtatggagttttaccatgaggagccttattatggctgtgtcattcaagcaaccagtgctgtggaagggaaaaagaaaaaggacaaggacgtggtgctcagacagaacatacactgggagaaacaatgctgactaaagcctgtgctctgagtagacatgatgacggtggcacagctcggaagtacagcaaacgcacaaaggaaatctgtttcccgttgagtttcccaatgaaatgatgttaaaggtctttatctctaaagtggtcagtgatgatcaccaagtcctatggcagaagtagcctatgttcatagagaaaagcaggcttgcgcattactgttcatattgagtgtcagccagatggtgggcattagtttaagcacgtggttccttcagggtgctttctgccatggtgaccaagactgtgctcatctctaggattctgagaagctgcaagacctgttccaggcagcgctggaactcagcactagcaccaagccttatgattgtgtgacagcctcctacctgctgaacttgctgatacggcaggatgctctgccagccgtcctgtctgcctcttccccacagcagctcacacgtggagcaggagagacgtctgctgtgctggaaaggaacacattagtgggtttgtattgagaaagtgacctttggctgtaacttagcaaaccctctgtttcattttctatttggtcagtgctcattggcttaagagtcacttgttgttatcttaagagtttatcagcacagaagagaaggcctgcattattcatgcaaattaacagtttactcacctttaccacctctctctctctttctctctctctacacacacacacacacacacacacacacacacacacacacacacacattttgtttttgagacagggtttctctgagtagccctggctgtcctgctgtcctggaactagctttgtagaccaagctgacctcaaacttggagatccccctgcttctgcctcctgagtgctgggattaaaggtgtgagccagcaccacctgactgacctatttcaaaacagcagacttatgctaaataagtacacaaatgtccattaatgagacacatgttctaaaagggcaactgttttctttctcagctcttgcctatggtcgtgtttctgtggccgcagttagatcatcctcattgcgactgtacagagctgagttaatttgatgttcagcattttcctcaatcacttctccaccttgttattttaaattatttttaaaaacattgaaacttaagtgttgtgtatgtgagtgtatgcctgtagtgtgtgcacctgtgtgcacagaggttagagaagaagattggtgtcctgtcctatcactctgttttcttcccttgaagcaaggtttctcactgaacctgtagctacactagtggtcagcaagacccagagatcttcctgttcatcttccacagtgcctggccatgctcagctctgggatttaaactcaggtttacaggcttgaacaagatagcatcaaactgtctctccacccctccaccttaatttttgagacagcttctccattgaacctgggtgctgtttctgctgtactggctgcagaatctgcctgtctctgcttcctaccccaccattgcagttacaaacatgtatcactataccagtcagtgctggcgattgtaactaaggtctgtgtgcttctgtaaggagtcagctctccagcacccaccctcctattattcctcctatgtttgaataggatttcatgtagcctagggtggcctgagacttgctgtgtagtcaggggtgaccttaagctgctgctcctcctgccttcccctcctgagtgatgggatgactggcatgagctaccatacccatttttctgcatggatgtagcagggattgagcccaggactttgcacatgctcagtaaatgaatagcaagtgcacggagcagcagcactcagtgccaccagccttcagggacatgcagaccagcagcacagagagggaaggcttcattccaattgagatggttaaagaaacccaaattgtaaaggttaattaggttgaggaggaactaggatatgtacttctaggattgagggcaagcactcagcctgtaaataactagagaagtgaaagcataaggagactacagaatgtccatagcagcagttttcatacttgtctaaaagtggaaataagccatgtgcacatcagggaaaagtgtgttagacctgccatatgaaagaatgaagtattgatacagctttcatgaactttgaagacatatgacacgtgattgtacccagtcatgtgttcatcttatttataatatgtctagaatctttgttggtgtgtttgttgttttcattttgagttttttgtttaatttgtttttgtttttcgggacagagcctcacggagcccggcaagctgccaggttactgtgtagccgggctgttcctgagctcccacctcagctcaccaaaggtctgggctgcaagtacatgtcagcacatttgctaagaataggaaagtgtatgtatagggacaaaatagatcagtgcttacctacagcagagcatggtggagctgccagagaggagtgactgctgctgctgctgctgctgctgctggttaaagccttttgttttagtttgtgtgtgtgtgtgagagagagagagaaagtgagtgtgtgtcagcagacagtaagaatgctctagaaaaattgagttttacactcttaatttttttattgcatttagtgtgtgtgtgtgtgtaagtttgtaaccatgtggctgtcagaggccaacttcagcagctaattttcttcttctactgcatcggatctgggaatctaactcaagtcatcaggtttgactgaaagctcctttacccactgagtcattttactaatttgtacacatatgaattgcacaatttctcaattgtatcttgattatactgttactaaatactatttttcggccacacagtcatactacatggtcctgaagtttgacacccgggtggagggtatcgagaaggattggttcagagtgcatgtcatcactaactccagcaattaagggactgcattccattctttaacattgccttaattacaagttggtaacgggctgataccccggaaaaatctttgattccaaacctctgaaacagtgacttgggagacagctcacacggtgcagtgcatgctgtgcacactgggtgacctgagttggaatcaccagctatctgtgaagggcaagccaccttctcagagctaaccagccagccaaccccaccgaagcagtgagcccgaggttcagtgagagagcttgctttcagagataaggtcgagggactggagaagacacccagcactgacctctggcttctacttgtgcagatgtacacacaggtgcaaatgtacacacagacacacacacagacacacacacacacacaccctctaatataacttatagttgacctgagtatactctttctctataaatgaattataaatgtgttttataactgaggccatttcagttttctgcttgctttttttagttattaaatgcttgatggaaaaccttgaggatgaaatatctcaagctgagaactctctgcttcaggctgcgtcttcatttccaatgtatgggagagtccactgtataacaagagcttttcagaggttgcctctaaagtaagacttcacagctatatcttgtttgagaaatagacttaatgtcctacctttagcttctcactggagtgtgtcttgggaaaagaatagtacattgccttaagaagaattgaaaattagatgtaatcatatacacgtgtttttaagttctttatatttcatacataactcatgtttgagccccagattctttcaggtccttctttgtgttacttagtgtaaatgtctgtactgtgtttgctgcagtgacctgcggctggcgagcgagtggaggccactgctggggaggcttctgctgctgtcctacaggctttccactgtggtggcccctgtcatccagagctcctctcctgaaggcctcatccctgtggacactgactcaggttagcaggcaagggccagtgcgcgtctgtctccatctttcccttactcgtttctttggagagatacagaaactaaattcagggaagaaccttttttcatgctatttctcatttttttagtaatctttgtaactattaaaaaatcacccccagcaggagagactttttgctcagtggtgttgtcactggtaaggtgaccttgttcctgtaaacaaactcactcatcttcctgtagcaaacttagtgtaagcattgacttaccctaaaggaaaaagagagagccgtgaagtagctgagggacttagtcgggataaagaagggagccacaggggtgaggaggacaagagagggcagtataggtgaatataggcaaagtatgctataaaattatacaaacattggtatactcattatggataaccaacatctattggattaaaaaaatggtgatccagaattgaactcagacgtatcatctacctcttccctcccacaccctgcctcttcgcatatgttcctgctgtgcaagtgggggctttgggattgcttgacagtctctgcaggtgccccgtgcatttcatttgctcttaaaaactcctacatctcttttcctttttctttgtatcttctcaccctctaggtaatttatggttttcttagattattctagatccttccctatggatttccctgcattctttctaataaagtttaaattacttttcctaatcatataatttatcgtttgaataacacatagtctttaacctttggttttgtcccactttgagactttagtgccctcccgccgtgtcctggagtagcttggctctctcaccgtccagcgtgtctcctagtctcttcctaacagctggccttcatggagctaacgttcatggaacgaaacatcagcactagacatcattgttctgtttttctgactgtgatgaaaatcaggaatgatcgtgatactaaagcagagttaattattttggcccatgttattctaaataccaaattttcatcctttagttttcctacttagtacataggtcaaaggagtaaggagcacacgggcttcttgctcgtccagctcaggcgagtactgggggattctgactgagcgatttcgggtgtttctgtttcctgatgttgatagtgtctgtagagcatgtcatacttactatattattattattaatgtagatggggaggatctgggcagatttgggagaggggaagagaatatgattaaaatatattgcatgaaaaaattaaaataaataatttaaatttaaaaaaagttagtctcagacactatattgacctcacagacttttcttaaattctgtcttttcttttttccttcatcttttttttttttttttttttcttgacacttacctgttatagggaaccccttagtaaaaggtcttccctgagagccatagatagatgatagggttcctaaacttctgttctggtcgtttttttctttttcttttctgtgctctttttctggcctttgtggggaggtggtggcaaatgggtagttatattattttcctggctgttaaaattttgacaaaatttcaaggaagcaacaaacaagcctaagatgttggttcagtgctccagacagttagagcctgtgtatttcccacagggcctgaatacatgcatgccatcttatatctcctcctaaattgttgtgttccttctgtgtgatcggtttcctgttggtcctttatgaaaactagtacttgggtggcttactgcccatccgtcacccattcattcagcccagtttcttgcacctctgtggagccaggtgtgttgtaggcactggtaatgcagcagcgagcgaagggccgccttcctggagtttactcatttccagacagggcctcagaggtgaagagacccttcaccaagcattagcactgggcaccatgctcttctaaactaaataggaaatctttatacgcctgtgtggccttgaggttacttttttagatattaaaacacagttttatcttttaatgttggtatcttatatggtgagctagggaaacaggctctgctgtcttgccacatgcctaagcactgtacacaagtgtctagataactatgaaaaacagtgatggcaacctttgagtggtaggtgtttgatctttgttttgggcacatcttcagtgtaagctctcatatcataagcgcgcacactgatatcatggagagcctgtgtaagtaaggaactttcacattgcccatcttgtgggtatagctgactgtcactgttaaaaatcatggcaactgtgaattagtctgaggaaatctgcacatgacctcgaactgagcgttcatgcacatttatcttttattcagcgtcagcaagccgcttgcagctcattctcaatgagatccagccacgggatactaacgattacttcaaccacaccaaaatactgaaagaatgtgatagctttgatttggaggacttgagtaccagtgtctcaaatattgatagttctgcagaagttaaaggtaagatacataaaactgatagtgtaatcagtggtgtgtgtgtatatgtgtgtgtgtgtatgcttgtgtgtatgtgtgcacatgtatatgtgtatgtatgtgtatggtgctggggccttgtaaggcattctatgtagggttgtactgatgagcctataccagtgcacaccaactgaccacaagtatttcagtaatgtaaaatgcacactttccttcctaaaaattgttttattttagattatgtgtatgtgtacacacctacgtggaggctaggggtatcagaatcttctggagctaaggttacgggcagttctgagttgtctgatgtggatgctttaacctcacttgggaaagagcagtacacactcttaactgctaagccatctgtcttagttagggttttactgctgtgaacagacaccatgaccaaggcaagtcttataaaaacaacatttaattggggctggtttacaggttcagaagttcagtccattatcatcaatggtgggagcatggcagcatccaggctgtcatggagcaggcagagctgagagttctacatcttcatccaaaggctgctagtggaagactaggcaactaggacgggaatcttaagtccacacccacagtgacacacctacttcaactaagtcacacctattccagcaaggccacacctccaaatggtgccactccctggcccaagaatatacaaaccatcacaccgtctttctttccagcctcacaaagcccttttgataatataagaaagcgcagatttgcagaacatttctgggaaacaaaatttttttctttttaatttgggttttggaatgaatttataagagccttataagaaaatggtgtgccttacttctacacagatgctgctataacacatagcttttgagcataagaccctttaccagtccctctgatggaagagcagggacacatggtgatagatttgggcagcatcaccacctccctgtctcactgctcactggcatctgctggacaatgcttgaagtgagcatccttttaaaggaaacctgacttctgagcggagcgtgtgcttctgtgctacagcaagtgtaactgtgcttttgggctactttattgggttcttctgtctgccatccttctcctctccagtcccttctacccccagcactggtagaagaaaagcctagatggggaaggggcatagatctttttagactactttctgatgattaggggcattgagtttctaggggcaagtccagtctttgtaatcaggatatgtgcaaccagcgatccagcaaccagcaaaatagcagtgcagggcggcagcagcgggagcgggagcagcagccgccacccttctcagacctctggcattcatgtaccctctaaagagtccccagaattccaaatataacctagcttcagctggcagaatcccacgcccctgccagagcacgagacaaatcctagtcaactgctgcagtcagtctgaaggagccccagagcccacacctgggattaaaaccaaagcataatacaactgggtttttaaagaaaccaaaattctcactaaaccaagtctctagaattccagcctgcatggcttgctttattagtagctactgaaaaaatttatcgatagaagtgacttcttaatgatttatcctgtgtctgttttccactaggtggagttattaacttgcaaaaaaattctctttgcaattgtttgttttaaattacaaaaaatatgttttcagtgtaacagtgaaatatgaatttaaaataaagtcatgtccattccctccccagttctacccaccccaccccttttgtgtataagtcattctgtgcatgctgtgtatttgtaagtacatttattcttttagcttagtagacttttcttataaaatcaagtaagatagaataaactcttgttaacttcctttttcatcttaatggaactttgtaaatatcagtgctaaaatacacctaaaacctgataagatgataggtaggaatacatttagtttatttgccatgtttataaaatatattttgaaatataattggtattttctgtgtttaattttaagagttcgtgttgaagctaaagacatagctcagcagttaagagcactggctgttctttagaaggatctgagttcagttccagcaccgacatactaactcacaactgcctgtaactagttccagggatctagggcctgcctttggcctctgagcaataggcacacatatgcacagatacacaagcaagtaaggcttgcttttaaatgagcataggaaggaaggaaggaaggaaggaaggaaggaaggaaggaaggaaggaaggaaggaaggaaggaaggaaggaaggaaggaagggatacaccctcacctacactaaataaagtaagtaaaataaaattgtcaaaaaaacaagagaaaaaagtccgtcctcagctagttctggaggcccacgctgtaatcctgacacccaggagcctcagcgaggagtgttgtgagtgagtttgaggtagtctgggctacataaggagacccctgtgtctaaaaaagcaaaaccagaaacagcaacaaaagtttgctccattcctcaattgataaaacagccattctcaccaaagtaaacacaaagtactttcttttatagccagtgtaattctttatgggtaacagagagttggaaagtttgtttcattaacattcaaatattagtcctaagttttgatgaagtactgtttcattttattgtttttgaaagtaacaagttgaagtcagcatgcttcctgttcattagcatgtgctctacaaatgttagtgtgttttgttttgtttttctctgaataaacagaacatatgcagatttgtttgttcaaacgatcagtcttggggaaattatgcattgacatgcttaaaaagcctggcatgtacaatagcttttgttttaatccttaaggtaaagaagaaaaagcgtgtgacgtaactgctcagatggtcctcgcgtgctgctggaggagcatgaaggaagtggctttgcttctcggcacgctctgccagcttctccctgtgcagcctgggccagaatcttctaatgtgttcctaacagtgcagcaggtgaggttcatcgctctacttccaggtggcatttgtggccaaggcacaagctgctatttgtagaccacaaaaaaaaggtttgaaccttaaatattttacatgtgccaactgagaaaggttcatgaagattttaggatagtagatggtgcactttattttaaaaatgtgttattttaagaaatatttttgcatcagtaactatagatttacctcatttttgactgcaatatttttttattcctttttttaacatacataaacttgaagtttagctgaaaatgtctattttgtaagactccacaggcctcttaaaaatttcaaagaagtaaaaagaaacattagctgatcatggctctcatgtttcccactacttcagtaataaagttgtagtcactttagtgtttttggctgactttcatttaagaccacaaagttagcccagcatctgggactgttcaagggatcgagtgcagtgtttacaagaaattagcttaccacaagcatttcatttggaaatattttagatttattagatttctgtttttaattgattccttcttccttttcatatggtttcaacaaatccatttcccacagtttcccagcaaagatgtatgtactttcatttttaaccttttcaaagaaagataattcccccacccccatagggtattagaacattcaagtacaaaacaaatattgtagtatgctaatgtggattatccctacagtaaccacatgactagcaccatggaaataatgctaatatttttattctcacactctggctcatgtcttacatctggctaacagctgggccagtgatgttgcaaggccttggaaaaacagcacagggcaaaggcaagcagcacattgggggcagcgtctcctcagtctcctcagatcaagcaggccttgctgtcccagccttcctgggagctgttattccagctggctaaagtgccattgcctgcttctggccgaggaatccagattagctatttcactagtgtgaatgccccatctccttacgaagtaaacacaggctaacatcctttgacttgtcaacttctcttttcaaggacaaattaaaggaatgcattttgcttttgattataaatgagaaaggcttggaagttctctatgaaaattattatgccttgactccctccccaccacacccaaagtttatatattataatgaaattatgtggaacagctatgttaaaattgagaactaatataaagaaaaaaatttagaagaaactaaaaatagcaactacacaaacttagaatctgaagaattctcccgtgactgcgcgtcagtgaagagactcctgcccactaagagaagcaccactgtcggacgagctgcctggtcttccacatgtgacgggcttttacatgatagcctcataggaagcggagagaagacatcacaggcttggggaagggtggggtgtaagtaattgctgcgtgctgactcaaactggtctctgtgaaaacctttattctcagttttgttggcttttaaaccactgtcttagcttaggaacatttaatccatgaaatgctgccatccagaaagtaatgccatttacattactataggatttctgtttttctgaacataaaattgcttctttaaaaaatgttttttttatttaaatatttcagatttgattattttctgggtgtttgcttgcatagaactatgcatcagaagtgtgcgctgtgtctgtggaggccagaagagggcaccaaatcccctggaactggaattccagatggttgggagccaccatgtagatcctggggactgacccctgggtcctcttaccagagcagcaagtgctcttgacagctcgtctagctcttcgtcatattgacttttgagacactgccttgttattgagcccaggctggccttccaagtactcgaaccacagcaggttctaaattctgcttttataaataaaaagtgattgcatatatttaatactttcaagaattagtttgtatcagggtgactggctgtacctaaggtaaatctgcacattcttggtgccaagaacatagtcacttagcaaagctacctttgctgtacatgctgacaaaacccaccaacctgagaggtcaccacttagataggtgagtgtgaacctagccgacttctctctgtaaagctaaaacagcagcagtcagcctgagtctccttctcacctccctcttacgttctgggggtcctgcttttgttctcagatcaccctgctttctgaccttggttaaggctgactactcaaggagcgcacacaggaggatgattataaccacggctgacaggaggcaggaggacaagttggggactttgttgctatatggagaggagagctggtgcttattttcaattctgagtttttaatgcttggttcattgaaggcgctttgctgtgatactccccagctcccttcagtatgaggaaatggattcattacctgggctgacaaagatcccaaagctaatttctgcctctgtccttcccctcatgggttcgcgtggcacagtgctccctttgttctgagtgactcacttaggttttctttaaggtgatttccccttccccttccccacaccagctctctcaaggcatgaaagataactttctactggagttttgactacctgatccttcctatagagcatttcttgtgaggcagtgtgctctcccagcttcttcaagaggaaattgttcccctggtggcaggtctgactgtcctgctctgtaatcacacaatgaaaggttcttttatagtgtcctgcgctggtggcagagataaagctgctttgagggctgtaagctgagacccttcaagagtgagcagtgcacacaagcttatctcagtgtttcctgactcactggtgtgtgtctaggtttcgagcttgctgctctgctgacagacctgctggatattttgttggccctctttccagtgtgatgctgatactgatctttaaatgcctactgaggttttaaaataacttctgtgttgaatatcaatttctctgtagattccacctagtgtttctaaaaacaggcttttgggtacgttttcttcacacttgcttgcgtcacactctgtagtagttgttcccacagataccctgtgaggaagtattgccagctggtagaaccttctgcttcagattctggtgatgcgtgggtgatcggggtccttgattggctgggtgcatttcctctgttgtgtcattatttaatttttttgtgattgattacaaacggaattcactcattagtattcataagtcacaaaggaattgcctgttttattttgtttatattagattttagaaattatgagtatattgagctctgatgagtagaagtgttaacttttaaacttcaggagagaccacatcatttagtcgcctgtttactgactgttttactgcatgggtgttgtgggaacacagagaagactcagatgtggttttctgatcacccagagctgagttatgcagcgaagcagtgcctcacttggagaacccaggcctgaagggtaacagtcagacggtctgtgctgagcatttgctagaacaaggaaaatagaccttctggtaagacggtgtctgcacaccagaaagcctttataatgatatagaggaacaaagcttagattttgaagaaattctcattgttagtaagaaatgattataatggagcaggattgcttttaaacatagtcattttattaggctttaagtcctgtggagcgtctcatgtaaacaaaatggaattagagtcttccagctggagacagtcccaacattataagaaatggttctgttttaaactcggaatttaaattaaggcttactattttatagtatactgtcaaaccaaaattagacatttatagactgctagtttatctgatggtaagctatagatgcctggagacatagcaagtagctgttctcccctgtggacttgtgacctgtaaatctgtaaaacattgctaatttgctttagggttttataaaaagtcagaagtagaatatgttaaatttaaagggcagtgtcatgtttaattttaagattagaaatcagtatcttctttttatttcactttagctttggtttccttcagggtccctgagagctgtgtatgctggcttgtgcctgtaatcctagtacttggaggctgaggcaggaggatcatcagagagtcaaggccagcttcagctatgtagtgagtttcaagccagcctgaactgtaaatgagaccctggctcaattaaatataataataaaatatccggggagaatttttgtttttttcctcgagatagggtttctctgtatagccctatctgtcctgaaactcactttgtagaccaggctgggcctgaactcagaaatccacctgcctctgcctcccaagtgctgggattaaaggtgtgtgccaccaccacccggggagaatttattttttatgttaaagtttgtttgtttgtttgtttttttaaaaaaactggaaaataacactttttgacccttagaaactcagtttctaatgaaatgcttatattttcagatgaccttttcattttaaaaacgaaattgagaagttttgggttcagtgctttctgccagggttaatccctgggacccatgtagtggaaggagagagtggactcccacagtctgtcctctgacctccattggcaccccatacacatacatatacaccaatgaatacatttggtttctgaccatttcttaccactgttacctgctttctgatgctatgtgtcaccttgttctggttatctactgagagggtgtcagcaggtgcttgtgttttgctagggttgtggtctgctggagaagaccacccaccaggcaaacgtgggactgctttagttgtatgatgtgctgtttatttatgccatttgaagggagttagcataaagaagcagtgggaaagcgatgtctgctgaaggagaagatagtgggcttctgcaggccctcacggaaaccctctgtgaacagcgttcgtttttattaaagtatgccacaatatcagtactccattttagggaaaaggctattttttttgtccttattttctctgctctgaaatgccttcataataacctattatttttgtaatgatagaaatacttgacaaaaaaaagcttaagctgaaggacatagcatattattctgaaatagtttttaaaaattcatcaagtactgctttgttggtctctgattctgtgtgtatcactctttatagcagatacacactgagtacactcttcataacagataccctctctttagaacagacagctcatattgaactaaattagttatagataattggtctgttctgaacttggtatttaactcatttaaactcaatcaccgatgaggcaagtgcccttagcatctagaggaagaaaatgagactgctcattctggtgtgtcttgatgtatgtagaacactaacccagtcactgctgaggtgagcaagtttctgggtaagcagatctgagacactgtagcgcagcttccctgttttcgtactgtgagctgtggaggcacagtgaacagatacagtttatatagtctggattttctgaagtcaacagccaccaaatctgtcaccaagtaacagaaagcccagttgggctaactagctcagcagttcttttagttcagaacagcagacacaactaattcttagttgttttctttaaaattagtgggtgtgctttgtgtttcatcttacctagagcaagccggcgtgtcagttgagaattgatagtggggcattctggcagagagtccgtggcttgacttagaagggcctcagactttcaggatgcctttcactgagcttcacgtgtagccttagtctatggctagcatgtgaggtgaatggatgtggcttctcaggttaggatgggaagctctttgcacagatagtgttagcagttgctcagcagtgtgactgtgcttcctatcattgaaccatacactgcaaaatggttgaaatagtaagtttcttatgtatattttaccataataattgcaaaatatttgaagagtaaacataattatctcagaatcatgtatgtgagtttgctactttttgtgattttatgttggtgttgaatgacatgagctagaagccatactatgaaatttgcaagtctggcataggaaaatttaatatattatatattaatataatattataaaattaatatattatattcaataaatatataaatatgctgtatcagtcatataatattaaatgagatggcatttttaaaaggcttaaggcaagtgtggtagatcacatttataatccccactgaaggtatgaaaaacaagaatttaggttattcctgattacattgttcaaggccagccagagctacccaagaccctgtctcaaaaaacaatggaaaggtgcttaaaacatgatttgttacctagtaaatcaatgttaaatggagaccaaagcattggttctgaattatattgtgatatattaatgaatctataaattgtgcacaaattgaatgtttttcattttttttaaaggttaaagaaataggagattactttaaacaacaccttttgcagtccagacacagaggagcatttgaactggcttatactggttttgtgaaactcactgaaatattgaacaggtaaaataaatgggtgggttttcttttaagagcaggctacagaccatgtgcaggagtaggtgttgtgtgtatctttaatactggagagaaggaagcctacttggccacagggcagctttctcaggttccatgtctgacagcctgcagatggctgactccagtctccgccgatgctgctctcacactcaaggctgatttgatgtgagctaaagactttgccaaacatggctctgaggttactgattcttttcatcagacgaaatgcatgttttgtctgtttgaaaataacttggcatttggaaccaaataaacctggacttctttgggtttatgtgtgtttcacggaataacataaagctttttttgtagacttattttatagaaaaatcttaaaataacaaaaaatagacataattcatcttagaaaaatatttagataaatcgcatgtatttaaccaaatgtgtttttttaagtttatgggtgctgataatatcatttattcatatagtagatttcctctaaatgacttgtaaggaaaccttaagttacttaatgacttaagtatttgtggcaaacattctctaaagaacagtagcattttccaggaaaacatttctgttgcctaaagcgtttgaagtgaagtggccagtcttgtagcttcggcggcccttttactgtacactgctgagaggtctccaccctgatgatttgtatcatgtccccacctccacccctggtaaaacatctctaaaaatgttctgtcatttacagaatttctttagatggcactttaaaaatctttctaatattaaactgttgatatttaaatatgctacttttaaatgtgcatgtgtctgtctgtctgtcagtttgagtgagtgcaggtgcctgtgaaggctagaaggacattgactccccttaatctggagttagaggggattgtgaactaccggatacataggtgctagaaactaaattctggtcccgggaagtagtaaggctcttagatgctaagccatcttctagctctataaactgctgaccttgaaaatatttttatcttttctgagctggatagatggctcagcagttaagagtattagctgcttttccagaggtcctgagttcaattcccagcaaccacatggtggctcacaaccatgtgtgtatgcagacatacacgcagacagagcatttatgtacataaataaggggtaaaggccctttgtgggtgggaccatctctgggctggtagtcttggttctataagagcaggctgagcaaaccaggggaagcaagccagtaacatccctccatggcctctgcatcagctcctgcttgagttccagtcctgacttcctttgatgataaacaacaatgtggaaatataagctgaataaaccctttcattcccaacttgcttcttggtcatgatgtttatgcaggaatagaaaccctgactaagacaggaggaaagggtttattcagcttacatttccatactgctgttcatcaccaaaggaagtcaggattggaactcaagctgatcaggaagcaggagctgatgcagaggccatggagggatgttacttactggcttgcttcccctggcttgctcagcttgctctcttatagaacccaagactaccagcccagggatggcatcatccacaagaggccctcccacttttaccactaattgagaaaatgccccccacagctggatctcatggaggcactttcctaattgaagctcctttctctgtgataattctagcctttgtcaagttgacacacaaaaccagcgattacaatcattccttgatatagttaaagggatgctttttattgttaatgagagagagaaaaaaatatccatagacacttggaagagtccagagcagagagaaagaagcacagtgaacagggccagcagactggagactgctgtctgtgagagaggggaaaccagcaggggacggagatttgagaagagagcagtgagaagagagcagtgagaacagctgagaagagagctggggcgtggcagtgagcctagggtagaaggggagcgaggagggctaggatgctaggatggcctttgaagtgtataataaatccttgtgaatagggactgagggaacctggaggcctgcatcgacctcagtgttcttagaggttcattggagagccccatgccccttttgccaggggtaaaggaaatgactccttttggcgatgagagccagttttacaagttcttgaggaatgctggcttctatctaacagaagtcttcctgtaatccaggttaaactcatttctggatatttggactgccttttggagtttggggaattggagtttcctttggatctaacagatgggaccacaagtagcctcttattcagcatggcaggtttgaagtgactgactgcttctgcacagcagcagtcccccggcagaagctgtatgctctgttctggcccagcagcctggcaaggcttaaagcatcgctccagtcacattctctgggttgtaaagagtcttcaggtcagactggagagagttcatttttttgttttttgtttttcaagacagggtttctctgtgaatagttcattttttgattgcacagtggcaaaaccattgtgtggaaatatatgtggatagaagctattgtagtggccagctttgaaaaatgaatctgtgacgttgaatgcaattgtagaggtcactaggcaatctgtgatggttcctctggttgtaggtgaccagaaaaatggaattgatgttacctaaacagagaaactttggttttgtttgtttgatacagaatagtaagtttgggctgcagaggttaagagtactggatgctcttccagaggtcttgagttcaagtcccagcagccacatggtggctcatgaccatctataatgtaatctggtgcccttttcttgcaggcagacatgcagacagaacactgtatacataataaataaatgaatttaaaagagtagtaagtttatttttccagtcttgagtgtgagacagtgctggactgtcctggcagtggacctcccgttgcagctggagtaggtgtgtgactgaggtgaggcagctgagacaggtctgggaatggctttcatagtcatcactcttggtaggattgaagagtggggatggaaaaaggacagagagccaaggacagaggctttgtgtgagtctgagcatgaaaggaaacacaatgtcttggtgtcagtttcagaactactgtgtccattccaggagaagaaattcggagtagaggaaaggccaagtgcctggtgtattgtccgtttctggtctgtcttaagagatcctgtcatggctgttgctggtggcttagaacctatctgttaggcttctcgtctgatgcctggtgattttgatccttcaggaacatttcaaatgtgactgctttatacagagcatctctatcatgtatagcacttttttggggggagagggggtgttggttggtttttaattttaaaagaaaatctgtttaccatgggcttttttagtggggagggaataataactgcttaaatgatgcaaacttgcttatgcatatagcatttaagaaaacatttgcaagaaagaaatctgggcattggtgagaactcatagaaatcaaggctggttgctggctaccctttgcactacagctgtgttaaggacgaaagcacttaaaaagattaattggcaattaactggagagttaaacatgaactatatcatataaattgagttttaataggattattcaaaatgtcttcaaatgtaaactgactttactattaaacaattatccaagataaacaagaccaggagagatattattctttttctcctgggaatttttttttgaaaataatatttatatatataacacaaacaaatgtggagttaattttctgtaatctgattttctcatttagtgagttctgtttgggacttgatgagatagatagtcagactttctttcaagactccgtaagtgccaagtatggttgtgtgcacatataacttcagtattctggaggctgaggcaggaggctccacatagcaagactctgtcccaagccaaaacaacaacaaaacaagctaaaactatgattatttatgcatagttagctacccaaatgtttgaatgaaatagttaagtacatttaaattaggaataaattcaaatttctggtgaaattcatacatagaactctcctttgtatttgaagatgtttgttttgatttaaagattcccaaactagagtgtggcctttgatttatccaagaatgggggaattctttcgggaattctaagtgtaggagggatttttgtgagtacttaatgatatcttgctcctcatatgagaattgcactgcctgctgaagtgtggttattctacaaataatctctatagtaattatagccatatttactttattgacccctaaatgaactgctgatagctagcaggtttagttataaagtactagtgatgatttgtgatatcaataattatggcagaaataatttaaatatttaatcttttaccacttaactatagctcctatgatgcaaattaaagtgaaagctttttgagcatttttgaatataataaaaactaagttcttctacctttctgcaaaacaaaagaatgcatcttcatagaattggacaaaaataaatgttaagtgtaatatattgggggaagaaatttatttcactttgattaacattgtattgtctaaagctttgataagatacttattgctcacttaactatcctatgaattttatttgaaatgtgaatgattaaattaggaatatgttataagaggctagagatagcaacagtgtatccacatacataaaataaatcttttttaaaaagccatatgaactgggggagtggtgggtattgagacagggtctcactacttagccctggccagcataaaactcacagtggacagtgctggcccaggactcacagaggtgctgtgcctctgctgtacaagtgctgggagtagtaagtgctgctctgccgagtcctttcttctagttctctagtggatttaaaagattttgggaaaactggaatgccttgatgtttatttcctaagtcattttgtgttactgacttgctagtgacctttgaatttttgtttttcacatctattttacctgagtgttttgcctgcgtgtaaattctccaggtgcgtgtagtacccacagaggctaggaaagggcattagatctgctagagcaggaggtacagttgtgagcctccctgtgggtgctaggaaccatacctgcaccctcgcaagagtgacaaatgactgtaacctctgtgagccatgtgtctatccctgtaaagtcagatcatatccctttttctggaaaatgtaacactggttttcaaagtcttcgtaatatgctgtcatttagacagaagaaccttgtttgttctcagtgagtcatctgtagcctggagttttaaaaatcaagtcttcaggatttcctccttgctctctgggaaatgatactaaacactaagagaaccactctttgggccctttctctcagcacttgagtggctgtccttactcttactgtggcttctttactcgtctgttcattgttgcctgtgcctgcagctaaggccagagtcgtctcctgatgctgtaacgcacaggctgtgacccaatgtgggaggtaaaatggcctctgttgataatgtcacctttttaccagcttgcatgtgtgcaaatccctcttctgatttaaagtttctccatacttcagagttatgttcccttttaaacattttttgtaatgcatatgtcttctgtccacatctttcattgtttagtttatttgaaagaaaaaacatgaacctttaaataataaacataatacctgaaaaaagaatgaataaagaattttacttaagaaataattggacattaccaaaagggtttcaggaaattgaatacctcaattaacaacaactaacaagtaatataataaaatccaaactcaacaaggagctagccatggtggatgtaggtggatggagccatggtggatggaagaagcagctgaaaagctgctttatacccagagaatctaatttatgggtacaaaagagtctaatgaccaattagtgggatgtatgatgtatgtaacttgatcttgtgttgtgggggttttcttatcttaaggtacttgtctactaagagtgagatagatggatagatggtggactaatctatttgtggaacaataaattgctttagtgttctgctcatgataacacagaggcctggacaccagccttgtgcatttctactgcttttctaattttaacatgttgaaaattattattattttctgttctgaatattgaatctcaagcattggcattataagaaagagctataccattgaggttaaccccagctctctgtttactatgggctgagaccgtgccacttgaagaggagaacaatcatacaaacctttcttctggcccctgctggattgttatgaagaaagttactgtggcttggtttttttgccaccttggtttgaagtaatagacagaagaaaaaaaaaggtagaaatttaagtgagttccaccactaccttgctaacagcagtacaatatctaacctgtgtgagatatatactcttttcagtaagcggaatttcactcactacatataatgctgccttctgatttgttgtgaaagtctagggggttttaggtgtgaaagagtttaggaaattagacatatttctttttattttttttaattcttgttatttttgtgggtgatgtatttgtgtggttatgtacacgctgtcatgtgtgtgtgccgagcagagggtagcttgtgggagggagctgattaactctctctgttacatgggtcctagggtctcatgtggtaaatgattttacctgatcagccatctccacagccttggaattgggggcatttttgtaagtttcctttagaattggtaaactgattttataggtgttatgtgtaaattaataatatttaactactaaattcatttttgatgagacttgaacacttcttagtaaggaacttgaaattgtatggtattcttgagactaaggacatacggtgtgttttgtatgagtttgacaaaggttgtcaaagcaacagagtcttcagacaaagatgctgtctactctttaattgggaggcatttgctgacagaagcaggacattggaattcccctggtctgtggttggtgatgacatagtgtgggcagaagccatctcttcactcaggatatttcctcttctccttactgacccctggattgtgtgatgaggaaccaaaacaaacaactagaatttgctgcattgttcttgggtgtctttcctggcttcattttacctggcagtttcttccttatcacaacagtaaccctggtgttttgaaatcacatccttataaagcaatctttccttgctggggaatgacagaagatccattgaagagcaagaacttgagggtgttttcattttctagctattgcgacctcatgttgtgaagtcttaaggttgtagcctctccttctacacctgcctttgcagttttgtgcccaccagaagacacaactaatgtgcagcagctgccacctaccctgcttgtttggtttatttgaatttagtcattcaacaaagattttagaacctcttctgaagtatgctagatgttgtgctgaacaagctcttgggatcactgaaaatccgatgtcctaggctggagtgactgggaacctagagaatgtttgtagcctgtgcgtgaaggcttatgtgaggttatggtaagatgttaggggcagttctcaccagggcctttaggaactttgtatgtttagggtgatacctcccctatttgtagcagtcactaaagaagcaaaagaatatctctttgagacaggatttctatgtagctctgactagtggagctgtgtagactaggcgtggccttgaactcagagatcctcgtgcctctgcttcctgagtgctgagatgaaaagagcttgcccaccacaccatgtgtcttgatttttcaaagcatctttgtaatgattttcttttttaaaccctctgttcatagccacacaagtagctgataaaacccgaactaaaatccaaatgaggggagggcgagtatttatctaggctgcagctgaggagacccttgttgatcttactggatgtaaggaattgtgacaggaggctgttaggagaggggaacaataatggtaaagtgtgagccttacttgaatggtacagaagagctttatttgagtgtgtgtatgtgttcatgtggttccacctgcatacaggtgcttgtagaaactacaaggtgtcattcttttgaaaccctcaccttgttcctgacctggtgctcaccaggtaggtaggccatgctgggtggccggccagccccttgcaaggatctccccttctctgctttaccaatgctgtggattccagagcatgtggctcttttatacggctcccagttgggtgccaggccctgttgtaggtacttgagagttaaaaatggatgggagggattatgtcctgggttccttggagcttttattttacaggaaatcatagcacactgtcaactagccctgtgtgtgcacactagcacttgcgagatcaaaagacaattcttggagttctctccttccatctagcgatccgagggtcaggcttgcatacatagctacttcgcctactgagctaccctgcctgcctggttttgttttttgagacagggcctcatatagcccaggcttgagctcactgtttagctgaaggtaccattaaacatgtgatcttttctccccactttccagtgctggggttgcaggggtgacctccaagccccatttagcaatgtttattttggtatgagaaagtttggtggtagagaaaggcctcttttttcatttaaactcaagtagtatttgaaagagcccaaatgattggaagcagcagagttctggggactggtcataagtatgtgggtacctaagagaaaaatggataaaatggaatttaatgagattgtccaaatccataaggctttgtaaggccagataatggatcaaatgcatatggaggtgcatgggttttggtttcctgtgggacgtactcagaatgaatttgatatgcaggcaacccagagaggatacctggcattggcctaaaacgtgactacaactctgtgtctttgcatagtgttttagaggtcaaaaagtttgatattctaaatagccagtctgaggggttagtcttgaagtctgttttccttcacatgttgctttgagtagctgatgatgctgaacttaaaccaacacataccatttattttatatcaaattacactttggcattatataataaattagttaaatgattgtcaaatgtaaatgaagaaagagaagtaaaggggtgtggcaatatgaaaatgtatcagcagccagcctctctatgtaacttcattttttctttttctttcatatttttttgatatttttagttgctttttaaaatttttattagatatcttctttatttacatttcaagtgctatcccaaaagttccctataacctccccctgccctgctcccctacccacccactcccacgtcttggccctggcattcccctgtactgggacatataaagtttgcaataccaaggggcctttcttcccaatgatggccgactaggccatcttctgagacatatgcagctagagacatgagctctagggggtactggttagttcatattgttgttccacctatagggttgcagaccccttcagctccttgggtactttctctagctcctccattgggggccctgtgttccatcctatagatgactgtgagcatccacttctgtgtttgctaggccccagcatagcctcacatgagccagctatatcagggtcccttcagcaaaatcttgacagcataacttaactgaatagattattacttagagctgtttttaaatctgacagttttcaattttacttctgttgatgagcaagggggaaggactttctgtcctaaaagttcttagagatggtagcctggtaagtgaattatttggtaaacaaaagtataggtacaagccttggccttgtgccagtgggcttgtacatggttaatttcgtggcagtgcatgtctgggtgcatttctgggaatttgcttcatacactcactttcacgttcttcacatttcgctgtgagagtggttgctttctgtttgtaggtgaaagtttccttaggtcattgtgaatgattcagttactatcagaaagtggcgtattaacaagaataagtctccccaggttcccaggggacttggagtgcctccagaatggttgagacacagttcccttcatgccgggcacaagtggcttccctgtcagagttctctgtagactgtcccgattgccaggttgctttctgtctgtaccacctagtccattgagcactattttagccttttaattctgatggtacatgttcagagactgaagttactctgaaaataacctgaatataacatgagttggaagataacttctgctttgttatctctaggaagatacttttctcataacagtgcaccccaatgcaccttctggatgagtgtcttttggaagttggtttcagggaacacaaccagctagttcttcttcgtgttttttgtttgtttgtttgtttgtttgtttgggagtgaaaactgaaacaaataacagactaatagctggtagtgtctttataaccagccagattaagccaaaattctagtggaaaatagagtcatcttccttgatgtaatgctttcttaattgagctgaagtcttggttttctgtttttgcttttttacccagttagcaaaagtgcagaagtctgagggaccacagttggctgattgagatgagggaacatggataagccatgtataactaatatgtgtaaatagatggtgaggtgagaccaatttagacttcttggggttaagacagttacttcttgggggaacttggggatgcatagctggggtttgtaaatatatttgagacatgactgagaaataagctggatttgtggagtctttcttttaaggctgggtcttattacttagcccagagtagcctcaatttcaggatccttctgtctcagcctctcaagtgctagaattatactacacctagtttgatctggccatttaaaaggattattaagaatactgtgttgagaataaatgatactggtaaaagtagagtgaccatttgggaagttacagtgtgactttaattcagaaagagatggtggcagtggcttgaaggatgggggagatgaaaaacccgaccagcatctgcatcgtttcaaaataaaatgcctgtggcattgacatatccgataggaagctttctagaagcagtaatgccaagatttttgacctgagttctggaagaaagttattattctttaaacactattttggtttactttgagtaaattgctaaagtacatcttctaggatttctctcattcagagtccctaggagaccatcatcatcatcatcagtagtagtagtaattaattaattaactagctgtgtgtgtgtgtttcccccttgtgagtatgtgaggttcgaggataacttgtgagaggctgttttctctttccaccataggtcccactgagacatctagttcccctggcagatgtttctaatgtgtctcaatccaggttttgcttctacttttgagtgtagtttagtgtggtgtagatattcaacaatggttagttatccttcagcatttttaatatactatgtcccttgttattgagggacatagcatgactgtactctggaagacccaacaagcagctgaaagagtcagaggcagatagttgcacccaaccaatggacagaagctgctggctcctgttgttgaattagggaaagactgaaagaagctgaagagaagggcgatcctgtaggaggaccagcagtctcaattaacctggacaccagacatctctcaaacactggaccaccaaacaggcagcatacaccagctgatatgaggcccccaacacacatacagcagaggattgccggttctgtgttcattcagagatgatgcacctaaccctcaagagactggaggccccagggagtttagaggtcgggaggggtggggagtgggggcatccacgttgagacggaggtgtggtgaggtggggaggaggtatgggatgtggagcagtaggagggtggacagtggggcagggaggaataggtgtggtggtggtggtgaataaaatatggagtgtaaaatacatacatacatacatacatacatacatacatacatacatacatacatacgtaagtaaatttaaaaataaaagagattttttgatacaatttaagttttttagcatcaatgtcatcttttttgaaattatactttgacacagaatatttctagtatttttatatgtgcctgttttattttttcaacactgttttttccaaatttcttgcattttaaaaaatttaagagtttcttgtagcaaagggtggccttactgtgtagccagagctgttgttgaattcatgatcctcctgcttttatcttccaaaatttgggattacaggtatgtgccatacctggcaggcaaatattccttttgtgtttttctcctttgtcataagatattgaacccagggcctggcatgtgctaggcaggcctctctaccattgagctacatccgcagctctcttatgctacttaagaagacatcattccttcagggtttctttagcgtactaaagccaagttatgttatagtctttgccagtctgccctatataattgcttttagagtcaatttatgttccagttattttgtgtgtgtgtgttgtgagagttggttttctgcctataattaggaaccttttgatgactttgttacttatgtggattctgtctctgaggagatagatcagatcttgtcgttttggtccatctcatcccagtcctgctggagtatcacagatggaactaacaagttgctaggcagcctggttcaggttcctggtgcttttggattttcttgtctacagccccagctctgtcctctctcctgggagagggagccactgaaattcccttccctggaggagaactctggtcaccactgctgcttctgaatgtgccttgctgtgaccccttgatgtgtcagcagtctcacctgctgtcaccccctgtggtttccttgctcttcagctgaactagttttagggcttccctctgtgtgttttaggtgttatgaggcaggactgttgtgtcacatgggggatgccttttcacatggaagtcacttactgtatctcatttaaatttctcatagtcagctaatatttttataaagtgcccccaaagaacttcttaaagatgctccaaggtaaattcttgaatgtgatagaagagaaaaacaggaagtagagctctgtaagttgtctttgatcacggagcttttatgtgacacaggagggatgggtcctgtaacttggctccatagttgggattcctaaacacccacgtagatgcttgtccaccctgacttcctagttggtggccttaaccactgtgttcataccttcatctgccaggaatcaatatttgtacatgcatttgtttgttacaagaatgatgcaagatcagttatgtggagcttggtgtgctagatgcataatagacatacaataaatgagttcagtgtagcaggaaaatagattttcagtatgtttaaattatagtgtgtttcatatgaataaagcaagtgagagttatgtcgttaagtgagattttcctatatgactttggggtggggtggggggtctggtccaagagagaagcagagctaggaagcaaggaatctaagaaggagagctcagcgcagagcccagactggacgccagccagtgggagagaggtcttcagaaaagctggctcggtgctgggggttccagagcagggcagggtctggatagaggggcaagaggcaggcctcaggtcttcagtgggcacgggggctcttgtgagcgcactttgccagctgtaaacttgtacaacattcttctgggtctgttttggaaatccccaaattaataaggaacatttggtccttagtatgtaatactcaagggaataaataggcctggctaagtgtttacagttcagatagccaagaatctaaatgagggaattgtctttgggaccttggctaatgtttgttccctggtcatctcctgctttctgcaccctaccctgcagattctccaccattcttccgagcaaccttcaaagtctggcttatatcctgttcctccatgacaccaccaaccctctgtacacctgtgcctagtaattgctctgtataagttagaaaatttatcagttttgataaagaggagtgtgtgtagagactataaacagatgcttagttggaaatatgggcttgtgtgcatatttggtgtgcatgttgtatgctcttgtagaagccagcaaaggcaagaaccttatcaaaaaaaatgtctttgtagaaattgatgaagttaaagtatgaaggttttatgtggctgttcaagaacagttctcagttcataggatgacccaggtttgaagacctgcctggcttctgtggccttcattcgccggcccaggaatgcgtaggcgatgttgtgtggagaagcgtccacatgtgcttgtgccgtggagtagagctgcagtgatttgataggaacacaagctcctgccattgctgtgctctgtgtggtgggttttatcggaagattacacctgccctagactgcagctttgtctttaagccagttctttaatggagcagaaaatgcaaggaaatgaaattcatggaggattctgcatcaagtcattgtaaaagtgactttcttaacttctgtatgtaactccaacacacacacacacacacacacacacacactcacacacacaatactttttcttttaggttttttttcccctaatgtccctgcctactcattgtgagctaaattagcccatatatattcttcctgattttaataatggaagagaaggcggcagctcaagctcttactatgctgttagcactttaggaatcgctttgtgcagtctggaagctggaggttttgggttttggtttttagtttccttagagaaatgaaagactataatgagttagttttattaatgtttatttctgtgtttatgagcgagcatgttcatgtgagtgcagatgccttcagaggtcagaggagggtgctgagtcctctggagctctaggattgtgggtgtggaaactcagttcaggtcctcttacctgagtggtacgtgtgcttaactgctgagccttctcctgggcctctaagttggtaatgttgatgtaagccaaagaaattactagctgtggctaggaatgaagcttactggaagaatagttacctggcaggtgggaggtccaggattcctcctcagtcctgtcaacataggacatttatctttaaaatggtagagaaagaagcaactttatccttacgatgtaaatgtgtgtatgtatgtatatgcgtgtaaaccatgtttaaaagtagagagaataatcgatccagttgtctttatcattgctcagatccgacaggtaacagaccttgccacacgtgctttgtacgtttgcatggtagttgttgaagtattaaaataattagtcttggtctgtgaattttatgcctaggccttcctgtgttgtgtctcttaacacgcagataccttccctcatgttgcactgttccatgcttggtgtgtgttatatctggactacttgcacatttttatgttatttgtcactattgttcttacattgtatttgttcaaatcaaggtctaaacaaggctggcatgttggagtttgttggctttttccctcatgtgcccatgtcaaggtttaaaatcactcattttaagtagtattctatttttaagtcagtgtgaattgtatttttaaatttcagttgctatttggaatagtcagaaatggaagttcactgttcttcaacagaaaaaaaacaaatcccaaatgtgtgtcttaaataaggtgtggctcctgctccaaattacagccagctgtctttttgatgattttttttcctctgcttaaaatcaaagcatttttccaacttgatatctgtttattttactgtgttaatttcagttacgcaggacctggtctttaattccttcttgggaaggctgagtaatggggttgccaagttccaggcttgaatgggcagctcactgagatcttttctcaaactaagaactgcaagggactagggtctggctcagcagtggagcttttgcctgtgcattaaagcccccgtctaatcccttaagtcagggcgcctactgtccatagtggctgcttgcctgtcattgagtatgctgctgcttcagctcatgctaatacagtagcgcaaaagtcttgtgatgggccagtgtgactgatggtcagcagctagcagggcctaagcttagacctgacaactgagcctcagatccccgcggtagcaggagagactactctgcaaggcattcctgcctgtttgtgtatgcacaagcgcttacacacacacacacacacacacacacacacacacacacacacacacacacacacacatttttttttttttttcgagacagggtttctctgtgtagccctggctgtcctggaactcactctgtagaccaggctggccttgaactcagaaattcgcctgcctcagcctcccaagtgctgggattaaaggcgtgcgccaccaacgcccagcacacacacacacacaattttaagagcatcctttgatagtgtccagatgaacttttaacatgtcttgcctcttcctagataaatttcattcttaatattttacagatttgaaaaaaaattatttgtgagaagctacattttaagtgcaatacaaataattattaaaatgtaagcctaaacatacttactttgtgtgtaatatcaataaataaaaaacaaattacagaaaactgtatgtgatgtttttgttggaacccttgagtcttatagtctggactgtctgtaagagtctagtaagccttcttcagagcattgtgagtgtgaaggcaggcctgtgtgatcaagcctattggtagataatgctcgctctgcacacagtagttgtaggaggtaggacctttaatagctcccagcccaagacacacagcaaagagggcgtcttaggagctttcttgctactgtgattgaaatattttataaaaagctgcttaaggagttggggtctgtcgtggttcgtggacagagaggtcgtgacagggaaggccaggcaccaggaactgcaagtggctgcttccaaaggcagacagggaagaacagaggggtgggagtctgtgctgagctcactttctcctctgatagagtgcactcacagctggtgcgtcttctcatcccagaaagggtgcccagaggcgggcgggcgggcggctctcaggtcattcacaataggtgtgtgtgtgatagtatagtaatagggtatagtaggaaactttttagttttagtcttctcaaaataaaatgtttcttctttctaacagtgttactgtatgtcactagtgtacacgtttaccttttagtacctgatgattccaaacatttgctcgcttgtaccttttaggtgctctaatgtgagtctgcaaaagctgccagagcagtggctgcggagcgttctggaggaaattaaaggcagtgatccctcatccaaactttgtgctacaaggcgcagtgctgggattcccttctacatacaggtactcccctaagagcaggcactgctctgtctgggcttggacactgtacttctcttcttactgtgtcagtgaaagtattagatgttcctgtcttttcagtaccatagactttgtgactttgttctttttattttttattacatttagtgatttatatgtgtatacaggcatatacatgctgtggtacacaaagagatcagaggacagctttctggagttggtcgctccttccatcatttagactccagggactgaatttaggttgttaacattggtggcaagcaccattcctagctgtgccatactctgtctcctgcatgactttgttttaatgtgtggacagtatgttctgtgtcaggtctgttcttggagcaggagatcagtcttgtataaacagagagtagcatagatttccatctatgtattcagtagtcaggaatcatggagcaggagatcagtcttgtaatataaacagagggtagtatagatttccatccatgtattcagtagtcaggaattgctgtgggtgtagtgactgcttacttttaggaagtatccatatttgagtccttttattaaatatccatcataaaaaatcataatctttttttgtttatttgtttttggtttggtttgatttggttttttttgggacagagtttctctgtgtagccctgctcatcctggaactcacttcatagaccaactggcctctaactcaaagagattcgcctgcctctgcctcccaagtgctggtaataaagagtgtgccactgtcacacagcctaaaaaaaaaatcacaatattaatagtagctctcgggtagtgtggctatgttgtgcctattacatcatttaatccctacctaaactctatgagctaggtacagctatcatatcctatatgagactagggatatagaggtgacttgccaaaggtcaaagggatgttagaattgctaagcctagtccatctgacccctgaccagatcttcatgcgagactatatgaatacagttcctaaacacagatgaaaacatgctcaacctcttgctttttaaagtaattatacctcacaggatagagagttagagactgttgctttcattatcctgaagaataaaccccagtacactcacagtactaaatcagatgccattcttgttaatagtaagacaaaaatccacaaaacgagtcttttagtccccctgtggttttttctttctctgttttctttcttgtactcccaatatcttcatgactttttgatgcccagttgcagaagtgatcgactgagattactagatagacctgagagatgagccgagctactttggttgagtgtggtttagtttcctatctgcaattcctgcagacctgctgtgttcatgtggccttctttgttgaggacagatgtcaggcaactgaatgtcctgtccagtatttgtgctatgtgcttattcctgctgatagtaatcttgtgctgcccatagttacggagtgatgagcaagtccatttcccaagcccagcaggtagcattgccataccgcttgcccagttctttgggtaaaggtgagtcaagccatgtttccaggaacaaaacctctcagccattgagtgtagctttctgtttttatcttagtggaatgaagttttaattgttagaaaaatctgttcaaaaggatcctacttttcttaacctgacttacaaataaagtaatagcttttgttctgctgacaacttcagtttaaagttagatatggcaaaaaaccctaccatttcagtgtatgagtttcccctttgtgtaaacagacaaaaggatttttaacattcatagagcatattttctgagcataagtttattgtcatgaatttaagtcttttacatggttgtcttgtatttgtcttattgcatagcttgtcattgatttttgaagacccaaagtagttgcaaactttggctctagaagccagaagcaacattttacaagacatacaggtgaaggaagaaagtccaagaatgtgactgaagtggatttcctttgacagctttattgagatataattcacctgtggacagtttatgcatttaatgcatgcaacacagtgattttcagtatatcctcccagctcgagaaccattagcacaatctaattttggaatatctcctgactcctacccattagcagtaacttccaatgtcaccgtacttccctctgctgtccccagccctaggcaaccagctaatctttctgtctgtagagttgtctgttgtggacatctcacgtaaatggaatcttacagtactcagtcttttgtgtctggcttctttcacttagcagtgtattttccgagttccttcatgttgtcacatatgtctatacttcgttcatttttattacattgcctcaagtgctgatagcccattattatgttatgggtatgttatgggatgctagtcacacagtaaacaatacactcctttgaaatccaaatgcatgatcccttggagtttgtaatgtttctttttgtcctgtgtagtttcaaatgctgtggtgtgattagactttcagtagactcttctgtgaataattaaattgttaattagtctcgagagggcctataaacctttagatgaaatctaatccagtatatttttgtcattgtgtaaatagagaaaattttcttatttgaatgccttgcttattgtatctgatgttttacctaattttggtccttacaaagtggccaatcagaaccatttattcaccagctgcttattattacataattgaccaacagacagaaggggctgtggagttgacatgtaacctaattttatacatgaacaggctagaaaagttaagctacctggttaaagtagcctggcttaattaaattcaatagtcttatttttaatagagggtattttaaatttggggattgattccaaagccagcaaataggtgtgtgcaaaataaaagccccttgatttggggatttttttcccccataggcattgttggcatctgaaccaaagaagagtagaatggacttgctgaaaataacaatgagggagctgatctccttggctttgtctgcagatgactcaaagggcagagtccctcaggtaagaatggaggactaaagtctccattaagtctctcctctacctttatttcttttaagtatctgctgaagatacagaactcctgaagacaggttactgtgacgtgtttagagatttggcttatttttgcttttttgttttctcccttttttagtctttcctatctataaaataaacttgccgtggttgatatgtagtgatcaaagtggacaactttaaaattgttgaaaacattcatttgacaagatatttcacagtgtcactatcatacctaaagacctgaaagtgaaaatggagtcacacttgaattgtgtgtgggctttgttgagttaatgtacattttgtagctgaacaattgaatctttctttacagtgtaatgtaggaatgttagtattttatattttaattttaagtaatactttaattcctttatgcgattgggttcaaacacccctcacaaccatcctccagcactagatagaaaataacctgtgcccctttccatccctggtaagcacctttcagtaggatgctcctgctgcactgtgggaggcctgtgctcggtgagggaaaagagaaggaacttgataggattttaagtcttaggtggtgtcaggtaccatgggccatcatgtgggctgactgtggcaaagtctggtgctgattaaagtgtgcataggggccaattactgtaacataattctttgggaaatagaacaaaaagattttgtagtattcaactataaatattaaaatttttgaatattgcttaatatttctaataattatttattttatgtgtatgtatgctttgacttcctacatgtatatgtaccgtgtatgtgcctggttcttatggaagtcagaacaggctgtcaaatcccatggaactagaattagacaagttgttactggagttgtaagtccccttgtgagtactgaacctgggtcttctgcaagaaccgccagtgctgtgggccatctctctaacactctgactagcgttttaaaatgtatttatttcagccaggcagtgatgatgtaccctttcaagactcacactagggaggcaggcagatatgtgtgagttttaggctagcctggtctatagaccaagttctagaacagccagggctatgtagcaaaaccctgtcttggagggaaaaaaaaataaaaagcaaaataaaatgcatttttgttaaagtattaaaacagtatttctacccaattgctctgttatcagggcataatctacaagataggaatagttgatatttattgagattctgtttgtgaatgggtttatgatcattttttaagattaaatgttccatgtgtctttggagagaacctgctattcttatgttttaggtacagaattgtgcatgtgttcagtggatgaagccttttggttgcattgttcattttgtaaactgcttacgtagatgttcagttcttaggtgtattctcctaaatgtacacttttatttgagaactctacatttctggtaatttgtgtacatatttagaattaccgtagttttaaatccaccactaatatttgaacttttcattctaggttcatgctttaaacattctccgagccttgttcagagacacccgtctgggagaaaacattatcccctatgttgctggtggagctaaggctgcaattctgggctttacatcccctgtctgggcagtgagtgttcttgccatgtatccccactgagttcattatgcttttgaatagtaggtttttataagcttgtaactttctcaggggatgattttggatcagaatacattttattcctttatggttccattttctctcctttgttggcttctaattgataatgactttattttgtggcttctatggcatttgtgtctttaacgtaccccacataaaatgtgagcgcttcctaatagtctcatctttgggctgttcctgctacagttttctttgtgatacacagtaaattgatactagactgctacttctttttaatagtccattatcactttttaatttaccacttcagccatctgtaagtatgcacagctcactgcatcaagtacagagaagttggcactattgcctgttttctgaccttctcattacaaatagaagggttcttgagactgtccaccaactcctggtctttccttttttccttcctgtgctcctgcagaggtttctctctgaatctgcctgccctgacacatcaaatacgtgaaacaatataatatatgtccctttgtgtttgatgtgtttctagtatgttgttgcatggatcagaatttctctactttctaaggctgaataatattgtggtatgccaatagaccatttttccttattctgttgataagatgatatcaatagacattgagattgttttcaagttttcaattgtgaatgatgaagcagtaaatgacagttgtcggaatctctgctctcagtttggctgtaacacatgggcattcagcttccttttttggaacgtgtttcctacagcagcagagctggtctctctctctctctctctctctctctctctctctctctctctctctctcttcctctctctctttctttatttgtttcccctccgcaaaccccctatcctaaccccacaccccccgcttctgttagggagctccccccacccactcctgcctcatcaccccagcattcccctgtatttttaaattgttaataggatttgaatcagattgagaaaaggacgatactcagctttagatttttatgttcttgttggatgtttttgactcacataaattgttctcttcaggaaaaatcgttgtcaatgaactcctaagacacaatcaatctctagctgtgtctgtaaggaagaaatgccagcataacggtttgctgcttcttcacagagcctcagtttcgattttctcatgtcatagataatgctaagctttgattattctcatgtagagttatactagataatattttctaccataggggattcatctcaaaaatatccaaacaatcttgtgtaggcatatatatctaatatgttgtaagaactaactaaaatgagctaattttgtgtgtgaggtggtgaaacttcattgaaagcctgttctaataagtgtgaaatagtattccattctggtttttaaaaaactcttcagactgattgtgtgtgtgaatgttttgtgtttgcacatgaatatgggtacccataacatgcctggtgcctgtggaggtcaaagagggcattggatctcctagaagtggagatacagatgttcgtgagccaccatgtgggagctgggaaccatacttagctctctgtcaggagcaacaaagctcttaactacctagtccctcccattctgggtttgatttgcatttccaaagtgattagtaataatgatctggaaacagaacaactcttaatatcttttttttctttttctttttttttttccattttttattaggtatttagctcatttacatttaaaaatatggaacgcttcacgaatttgcgtgtcatccttgcgcaggggccatgctaatcttctctgtatcgttccaattttagtatatgtgctgccgaagcgagcactcttaatatcttaataggtctttcagagtctgtggattcctttacccacagtgtgtcgttccgtcagcagtagagtcttcccttccagtcctggtagacaacaagaacaatgcactaacctttgttgttgggggcttttctggcctttctgcctggcactgagattttaataacccaggtgccccataggttcatgtgtttgagtacttgagtttctacatagtgtcgctgtatgggaaggttgtgaaactttacttggtagagcctttaaaactggtcactgggagcaggtcttgaagctttatagccttgtcccacttcctgtttattctgtgcttcctgcctatgtatacaatgtgaccagccagtttcctactcctgtcacctgacttctgtaccatgacagaactgtaacccagaataaactcttccttcctgtatgactagtataacacctgtttaataccatgttcaaataaccaaagtatggcaggtttatatcaataattccagtccttgagaaactggagcaagaggatagcttgggtcacataacaagatcatgtcttattaaaaaacaaaatgaaacaaaaaaaaataacagctggggttatgggtcaataataaaatacttgcctagcatgtgcaagaccctgggttttaaataaagattatttaaaactcagtaagaaaaagacaacccaattaaaaggtacatgcattttcccagaaaaggtgttaatcagtgggcacaggggaaagtgtttcctagcgttttgttactagggaaatgcaaatcaaagccatccacagaatgtaaaaacagcaacaacagcacactaacaaatattcatgtactgtaggtctgacctgaggcaggggcatcctggtaatggaattgcaggtgacagatgatggtgtgctgcttgggacactgactgctcttattatgacaagagctctgtgatttgcctaccattgagtggaaatctctgtccagtttagggactacactgtgaatggtataaagtccattttcatggtgattgtggatgaattggcaattcacacttctagagcagaggtggcagtgggtggccattaggacagatgtggtctactgctgtgttttatttggcttacaagatggtgcctccctttcctttaatttgttgccagcatttccaaatagtgagatttcacataaaaattgaggtttctggcttcccttgaaaaacacagaagatctggcaacactggtcttctattccctggaggccactagtcagcctgagctggatattaactggcctagacacagtgctctgccatttctattgccagcactctggacagctgagtcggtggctctcagtgcaatggcttcggaagcccctttctaattctactgcttttactgttaccttcttcaaaaatatgcgttgcactttcctgtgcttgagtacataattatacagctcatgtgtagcagtcagtcacattataattgttaagagcttattaaaaagcagaagaaaacaaagtaacagctggggttatgggtcagtgatggatcacttgccttgcatgggcaagaccccgcgctttacataaaggctatttaaaactcagtaagaaaaagacaccccaattaaaagtacatgcatttctccaaagatgatattaaagtgacaaaggacacatgggaaagtgtttcctagcattccttccacaatagaggtcccaggcacggagcttatgtcatccgacttagcatcaagtgcctttatctgttgagccattttgctggctcacattcttagttttgataatctctctgcttatattactagttgacatacattattatgatgatgcctacttttaatataggttctgttatagaagtttaaaatttctgattctgagtgttcttcatgattctggtataactcagtactcgctcatttgataagataattgaggaaggctaatattaggatagtgaagatttttttgtgattccgaaggatcttgacacaatggcttagtgaagataggctctgttagtatgttggagtaataattatgctttattcataataatttttcctttattaaaagatttatttgcttattttacctgtgtgaatgttttgcctgcatgtatatgtgtgcaccacatgtctgcctggttttaaggaggttaaaacagcattagatctaaaattggagttgtaattggttgtgaggaaccaaatgggtgctgggtcctcttcaaaaacacccagtcctacacctgctgagccatctctccacatgatcttgcccccttttcttttgaaagacattatataccctcatgatattacccaagacattatataccctcatgatattacccaagatattatataccctcatgatattacccaagacattatacaccctcatgatattacccaaggcattatataccctcatgatattacccaagacattatacaccctcatgatattacccaagacattatacaccctcatgatattacccaagacattatacaccctcatgatattacccaagatattatataccctcatgatattacccaagacattatataccctcatgatattacccaagacattatataccctcatgatattacccaagacattatacgccctcatgatattacccaagacattatataccctcatgatattacccaagacattatataccctcatgatattacccaagacgttatataccctcatgatattacccaagacatcatataccctcatgatattacccaagacatcatataccctcatgatattacccaagacattatataccctcatgatattacccaagacattatacaccctcatgatattacccaagacattatacaccctcatgatattacccaagacattatacaccctcatgatattacccaagacattatataccctcatgatattacccaagacattatacaccctcatgatattacccaagacattatacaccctcatgatattacccaagacattatacaccctcatgatattacccaagacattatatgccctcatgatattacccaagcaggcctgcctgtagctcacgattctcctgctccgacctcccaaatcctggtcttacagccttgtgctactgtgactggttgttttactttttattaatcaattatcataaaataatttcagaggctgtgtggtgttactgcacacccttaatcccagcagaggaaggtgaactcttgaactcttgtgagttcaaggccagcctggtcttcagagggagttccatgacagacaggaggactatgtatgcagagaaaccctatcttgggtgggaaaaataataataaattaaaaacaaagaaagaaaagaaatcttctgagttaaataacttgagggggctattggcattgtaagattaataataccatcctgaatactaaccgccttggctgctttaattcatggattctatcaagttaaacctcacgagtgtccttcacagatgaaaggaggagctcgggtctccctggtgtgctcattgtcaggtgacgtgggaaactaaagtccgctttggttttagaagtatggtattagaaagactctgctgtgtgcagtggttggacttgcacagctggtacagctgaaaaggaagccattgaatgaattatcagaattttttttctcagttgccttttttatgaacacaatccttattttctttagccccacctaattagttaatgattttgaatatctagtttaaacattataaatgggtttcgtgccgtaactactttctaactctcactttctgtttattttacattaggtgagaaattcatccacacttctctttagttccttgatcacaagagtttttggcgttaagagaggaaaggatgaagtttccaaaacaaataggtaagcccagtgcaacctcaccttcacacagaagctcgggctaatgtagctgctgattcagagtcctcagtgagccaagactgtgcaggtgctccagtgggctcagccatacccaagtctgcgtccttgggcggatcagctgtgtaataagcaggtcttgggaggcagcaggagcagggctgcagggcagggctgcagggcaggagtgcagtttgactacctctgggtacataagcaaggcttctgtctgtacttgttatcttcttcaagtattgatgaaatgcccccaattactctttctagttgcacttaaaaaactcttcagcaggtcatcctgtcatgtccaggtagagacgtagccatctctgtctgtgttcagtgtatgtccctgactcctttttccttgtacgttgtatgtggacacgtggaagaatcactacgtctggctttttggagtttatgctctcagatacttttctcgacgtgatatctttagtgaacctgtgcacacattttgattatagacaatttaaatgcacggtgaagttgtatgcgtttctaaagaagagaagcaattaactagggaattgtttccactgcagaggagttgatgcttgtctaacactaggtgtcactgttgttttgtgttcagttgctcccttaccattacttaggatccagtttggttggctaagtggtctttagttttccctctcacctaaaaaggttgccatgctccaaatttaagttttaggctgattacttaaagagtgaatttttttttctttttggtttttgttttctagacagggtctctctgtgtagccttgcctgttctagacttctctctgtagaccaggcccaccttgagttcataaagacacacctgcctctgcttcctgagtgctgggattaaaggcgtgctccattattgcccagctctcagcacaccatttggatgctttgcacaccactcctaagatgacctgcgcctccagcacccacagtgtttctctgctgctgctgcttcttgttgttgttgttttttttttttttatagatttatttacttatttcatgtatgtgagtacactgtagctgtcttcagacacactagaagagggcattgaatgcccattacagatgattgtgagccaccatgtggttgctgggaattgacctcaggacctctggaagagcagtcagtgctcttaactgctgagccatctctccagccagaatatattttcttgtgatagaactaagtcttaggaattaaaaagtatgctagacactgtgacactgaggcacaccactgtaacaccagtgctagagtggctgagataggaggattgtgcatctgaggctagccttgacgacagactgaaaccatgtctcccagaaaaaaaaagttatgagatatatgctgtcagtgaaacttcgtgtcactctgaattgtaatttgaaaatctatttaccactctgtaaaactcaccatatatataaaagggaggtaactagatataattatgaatcacctaagaatttgatgaaaatactagactattttttaatcattattatttttctgtgtatctatgtgagcatatgtacacatgtatgcagtacccacagagaccagaagagggcatcaggtctgtgaaccacctgatgtgagtgctggcatctgaacccagattctcacaattgagctgcaactgtttttaatggctgaggcatttctctagttcttagtctgttctgaaatccaaattgtagttcaaaagcaaaacattgcttgtttggaaggatgatgataatttttgtttttcttaaagtagtttgtccattgagtagtttaaaatgactagtgctgcttctctttaggtctgtgcacctgggtcataattctgcagtgtgctaaggttcaatctgcttataaaaccgtgattactggtgatacaaaccaagcctgaggagacaaccctatagcctcagtcctcaggatgcaggtgcaggagcatctggagctgaaagtcagcctgggctacatagctagtttgaggccagcctgtgctactcggaactttgtcttggaaaagcaaatataattggtttcttcttatagttgtgaagtgcatacagattttactatgagaagtactagagaaaatgatgagatgtttaatttaggttgaaaggggggaagaatatggcagtcataaacatggttttaccaacgttacactgatggagatcccttctgtacatgattctctttgagttggaaagggtaggaaatgagaactttcctggagagaaagaagcagcgtagttcagaatggttctagtgcagtggaagggaagtgaggaaaaggaggaaatggattctttattcagtgtgatggtcgcttttggtcagagcccttgtgtttgtcatctgaagatttgtcagggccacccttacacaggcttctgctttctcccaactggaaagcctgtctcagctgtcattggatctgcactctaacgccttcatggcctccagtttgcagcagtcggtctgcaaacgagatgtacttggttgcttcgctttctgctgcagtgcacatctgctcgttcatactgaggcctttccgtctattatttggtgtatgctggaaatgatggcttgacttttgtttttttgcaatcgggtaactaaactcacctggtgacatctcacaggatggtgatgtttgctttcacaaggtctctgctctgccagagaactacaaatgtgtgctactggtcaggaaggagttgacaggaaaagaacacctgcctttttcaccagctgtgaaaatcctgtctcttggagtaaacagcttggtttctaggctttctgctgccactggcagtgaccttcatagactcctttagctgctccccactaccatcccaggatactgagatctaggcttctgtcagagctaagcactagactgccttttcctctgacagcgttggagtcctgcacggacacagacgcatttgctattgcttctgtcctgcttctgccacccttgccccgcacccgtgctgccaggtttttgagaaaagtttggtgtcagtgtcttgacattctttgtatacttggtgcctctaaaactctcttggatgtaggagactaacagacagacttgcttaataagcacattcttggtgctaaacaaagaagaagaagctggtttctcctgcttttatccccaggtggctgcagtaattgactgaaacaagttctagctgatctctctgtgcctggagttcccctgtaaaatgagggttcttggagtatccctgctgtccttctttaaatgctaagcccaggctttccataaagttcttagaattgcagattcggttaagtgcagttcctagtgcatagacctgcacatagtagggtaaaacaaacaagcaaacaaaacctactttcataaataaagaagtgatcaagagtccatcttcctttgtaagtgtactaaaataaaggtgctttttgagctcattggccttgttttatatgtgttctttggtacgttttatttgtctgcatgttttaaactgtgcatctattgaaggatatcttgtattgtttgtggttttgaactgttaacagataaagctgtgacggccattcatatatttgtatgaccacagagttttacttccctggattgagtggcgagttttatttatattttgtgcataggtgttttgcctgcgtgtgttgtgtgtctgtgcaacatgtccatgtagtacccactgaggccagaagaaaaagtcaggccctcctgaattgaacttacagacggttgttagctgccatgatggttctggtaatggaatccggttcctctggaagatcagtcgatcactcttgtttaatcactgagccatctctccagccccttatttgttgtgttcttgagtagtattttatttagattttctaaaacctatttccttgtgtttcttgtcatttaacagacttagaactcagcctgactcagagctctgaccatgctttctcaaacagctccatctgcacagggagggtgggggtcctgcatgactctccctttcttacagcagatccctgatttaaaccctatgtgaattaaccttcaagttgtcttattcaagctctataaccaatgtcaatggataatagtctgaaaagctttatttttgaccatatgacatccatatggacagtgtagaggaagagagtgaattagggtagcgtttgcacagtcctaatgcagtgtggcgctcatggcaagcacctactgtgaactgttaccagttaactgtgttaactgggagaggagcacatgagggtctgaagcctggtctagaagcgaggagcttacagttcagctgaagacacaaagattgagactgtgaaccaggtgaaatggaaaatatataccataattatctgcataacatgatacaagtactgaattctgtagatatttgtaaatggaaaactaagtggaatatttgaagggaaattttctttaaaaggcacagtggatgagtagatctgggtacatgcgagaaatccaatctaaaaaggaaaataaaatttgatttactgctatgcaccttctttattttgtcttcttaaagagaaacgcgtagaaagattttgtacagtgtaagaaggaaatgtgtctgtaaaaacattattagacccaactacatggatctcagtgactgtggaaagacactgcatgactttactttctggtgtggaaaggacagaaccattttagttacttctttttctatcttgatggcacagatgtgccagcatcttctaaggagtgtcttacgctgccccgcactctgcttcctggaagattgtgaagcagttgccagacagaactacttttctcttgtttttcatgttttctaggaaaacagattccacaagtttctgtggttacctactccattgttgaaggaagaactggattctcaaaactcaaattgagagctgtggagtatgtgggtttttgtgcttttgaaaatgtaattattagaattcacaataggttgtttgatttgaactgtttagtagcttgcagcaagtacttatttggccaaactgaaaccagaattttcccaaaagaattctcattttcttcactaaatgtgcatttgttgtgtccttactctggaccaggtactagaatacagacagggatcagaagtattccatgctgtgctaaagatggagctcaattgaaggtctgcgtggcgtccgcagagccctgggttcaggctctagtaccactgaaaccccaggtggtgatgagtgcataaagtcccagcacttgagaggcgaagactggaaggctggaaactcaagttcattcttaagaattagaagctagggctgtagagttggctcagtgtcaagagtatttgttgttgcaaggacccaggttcgagtctcagcacccacatggaggcttaccacctcaaagaccagcaactgtggtgcacagacacacatgaaggcaaaactctaatacacataaaataataaaaatctaaaatatttttaaaacatttgtttacttattttatgaatatgagtacaccaccattgttctcttcagacacaccagaaggggacatcagaccccattacagatggttgcgagccaccatgtggttgctgggaattgaactcaggacctctggaagagcaattggtgcttttaaccactgagccatttcccccagccctaatttttttttttttaagttagaagctagccttggttacaacattttgtctaaaataatttgagaagatggaggagaaaagggaagttgtcatagccagtaaaggcatgagtcgcataagcctgaatatgtaaattcagtttcttgaacccacaatgaaagcagaaggaaagagtgattacagagttgatcctgcccctccccatcatgcgcacgcgcacacgtgtacacacacacacattccatgtccttggggaaactgaagggttgatgaagattatctgctgtgttcgagtctctgttgaagggcaggagaggttcccttgatgcctacccgtttcccatcctgtgttgtacgggcccggccttcccaggccccctttacttcatgcctatggaggtaatggaagaacgggcttcagtatcaaggattccagtatcatgctgcagaaccaggaaggtagaagtcttggattcagtttgacttaccccaccaaggtgccagtgctgctgttagacatttgccgtttttacagttaactctataaaacttttatgtttgataatagctgggtgctatgggatgagaatttgggggcttataaaacttctttcctgtaatgtgatttcttttagacttaactaaatattttttatagtccatgcttgtgtttttcattcatgtctttaattaaagccagtcttgattgtaacagccatcattacttggttttatcctaagaccctaagacataatagtgcttttcacactttgtagatgtgaaaattgagttacaggaaagatttgctcaagatcatgagtagcactagcagtaaaagtcaatgattatttttagctcacattagtttgactagaacattttttaaattgcaggtttttctagtagtaacaataatacaaaactgtattcagtgattcttttgtagaatatgaattttattcttccaagaagatacttcacttatcataggcttttaaacggtgattaaaaatcaagagtcccatgttttgatgtggtttagaggcatcatccattcattgtccacagacgtttatagagcattaagtttctgttttttagccagagaagaaaagtgactgcctgtaaagactgagaactaaggctcatggcccgtgttgctgttgttgagtcgctcttacaactagagtgaagtctatgctgaccctttgagccagggtagagatccatatcttaagttactgttcaattctcaggttcaagaattgtaggaagaaaaccacaaataaaatttttaacttaaaaaaaaattcttgaaaagtaatacattcatgaaattgaagagggatgtagtcattgtgttcttaaatattgactcttgcacggaccacgtaatcttcgttcttaagtactgcttcaggccattgcctgctttaataactcaggcattgttgttttcgttagagcatgttctatggaattttggcaatgcatgcatcctctttctgtatcttagaaaagcacgagtaaatattttttctttgctttggtgtttttgtagcttaaattttatatgagccagactaatataatgtaataccaagattacataatttaagacgtcagggttgcttccaggccatgagatgaatcttcatttatcgggagggttacaggcagtacttgttgcacattcactacctgtagagacagacagaccacagaactgttttcgcaatgagaaggcagagtcagaaaggttaaacactgaggagcagcatcgttagagcgtggggagtattcccttctcgttccaacttagtcctcaaaaccattcctgttagtgctgaggaatttgagtgctgttgcagactaaatttttagactatggttaatagagtttgtattgactacttactctgtacctgggcactatagctcatgccatggtcttatacttccaggactgtattgtttagtgaaagagaagataattttgaacttgttcaataaatgtgattactagacgttatagtcctgactgtcagagacgttaaaagtcctttacaaattaaagtgcttcctagagaggaaaaagcttcatattttgtattagaattttcaaccattttattatgaagagatcattccttttttccaaactcttgattcttggttatgttctcatagcatggttggggaactaatcaggatgccaagggcctgatcaagtcatgagttggtgtgtgtttatgtgagaaagttagcagctgggcccaggaacagtggtgaatagatagataggctttgggcccttttttgaggcatataactgctctgagagggatggcttcccaaccaaagttaagttccacttataggagtgatgaaggttgggggatggatgtttattaagcaattaatgatgtcaattgctacgttcgtctagggtccagaatctagaccatctccagagatctgaagatgtctttataaagaatagagatgtcaggcatagtggtgcatgcctttatcccagcacttgggaggcagagacgggggaatctctgtgagtttgaggtcaacctgctcaacatagtgagttccagaatagctagagctgtatagtaagaccctgtcttgaaaaaaaaaaaaaaacgaacaaaaatagtgaatttaatattgaaagataacatatgcagtattttgttttagcctataagaaagtttatttttcttgtatattttttttacatataattataaaatgttgaactgaggctgttttctatgactttatacacatcatttttgtaatcttgcatttaaatgcagtgtcatctagtcttagtacattttgtgtttctgaatcagactgtctgagattaggtaatatataaagcttggcctatgattctggtggctgcaagtggtcaaaatcatgaacttggcattcctgagatatccccatgtctctatttacagcagggcagagacacaaaaataaccacatatatcagggccaagtgtatgggcagccttgttgtagtataacctactctgttgccatgtgatccatccttcaagatagcgtagtccactcaagagtgtgtaattttcctgtgatcagattaccttcttttactggttccatcacgtctgagctgttatgccgagggccagacttccagtatatgtacctttgagggaactacatttgtagttaacttccagaaagaaagtacatcttttcagataaatggtgtggtgaacattaaaattgagattctgactatgatatagttattctctgagactgaaatgtctcccagtatcatagctatggtggtttgaagactttgataggctcatatatttgaatgcttgatcctcggttggtacagctgttggagaaggatatggctgtggcgttgttggaggagttatgttactggagatgggcattgcccacgtcattttcagttagctcgttctctctgcctcatgcttatgggtcagtgtgtaagctctcagctactgctccagagcagtgcgttcctgacttctgccatggtccccacagtgactatcatggattcaccctttgtaactctccaataaagtgcttccttgataagttcccttggtcatggtaccttagcatagcactaggaaagaaaggaagacaatagctgatctgttatcagctaattgcaaactgtgatttactttggaatttgacccatatgttacaatgttgatttccttgttggaaggtaaaactgtgtgaagtcaaataatacaagtttattggacttggtattttagatttatttttatttctgggtcccaaatccccattcattttaaattgaatgtggtattttaatctgacatttttggcctctctgctcaattcgtcttgttgtcttacataatctctctttttctggcagtcaagtttttcttttccatcctctaattgttgagttgtatattctatacaaactgcttctatagaaggagcacgaagctgtctggctcagggcaaaccagttgggctgaccaggagaagagtagactagctgcattgcatagggcctgatctatctgctgagtcttggaggcagggctaaaatttcccctctgtgagcacagaactcagctctgtgccatcttcatgtttgctgatttatttctgtgactactgaggtgtctgagtcttcagatgcatagaggtgtcatttctaccccttcattcagttgagtcctttcaacatcccccgtcacagtccagacgctcctgtgcttgtaccatgtctacagaattggtgtccattcattcaagcctgtgggcactgacagggctcagacacttagagaatagaatcagaatttgaggacaagtagagcgatgctgtgacccaccaaggactgcttcctccagctaactctgcacaggcaggaaggtggggaagcacctggcttctgtctccctcccctcataggatcaggctgatgctgctccttcagtctccgctttattcctctgaacaaatgcacctccagcagaactccgtcccagtctttaagcttgcatgcttcaaactctttcctttctccatgttttcttcctgtgtgtactgttcttctttatcgagttccttaccctgccagaataaggaggaagtacagagcagcgttgacactatcttccagatttatatttgcaaatgaagtgataacttcaagaaacattgtcaccgatctttatagataagacatgtcctgtttttactaaaacaaaaataaactaacaaaaaccaaaataaaaatttagtgtaggccagcatctttatcttctttatgatttaattaagctttctctaaagtgttaacactctagagaaataaaagaagttttttgaatggtactttctcattttggttatttaccagtaagttgatgtcttaatgtcttttcctgttgctgtgattaaacgctctgacacaacttaaggcagaaaggatttatttcagttcacagttcagggtatagttcaccatggcgggaacatggggcagcaggagcctgaaacagagacgatgaagctatggtgctgctgctctgtcacctttctccatttacacagctcaggtgacgcccagttaagatgggtcttcctgtgtcacatggtcaagacagtccctcagcaggcatactcagaggcttgccaagctcctcagtgattctaggccttgtcaagctgggcatttaacacttaacttttatcattataaaaatataatggtttgccgggcgtggcccacgcctttaatccaaacacttgggaggcagaggcaggcggatttctgagttggaggacagcctggtctacaaagtgagttccaggacagccagggctatacagagaaaccctgtctcgaaaaaccaaaagaaaaaaaaaatatatatatatatatatatatacacacacacacacacacacacacacacacacacacacacatacataatggttcagcagtgaaatacctcatttctgtggggtgcctgctaatgaaagtctcgctgaaattgtttctcacttgttatgtagccttgccacagatggactgatcatttttaaatacttgggttttttccttcctgtttttatccctggctgccttcaaaactgctctgatataactaccaagctggttggcttgtccaagaaaattgaattctgtggattccattgtattttctgtggggtttctttgaaaactccctcttgctcccattctcattaaattgaaatttaatgattttaaagtcccagtaagtttgtcttcatctggagtagctgtgcatctagtctggtcctgttgctgagcacgtgtgaggaagcatctgctgtagtagtctaaggagtacaccagaacatacaataacatacaatgtgcttgctgtgaaacagactcaaattagattgtaggcaaagtaattaaggaagagctaagctagtgttacattatgaaatgacaatagttttaagaatgaggaaatgtttgctaattagaaatgaagttctgttctgttctagaataaccggaggcaagcttctaatgattcttacatattcttcctgtgatgttcgtgcagatacacatgcatgtatatttggtgctcagccaactcaagggattttgctgccttttagagggataatgtgagttttgatatatatccctctaaggggaggtgtgaggagtgtagtggctgtggatcaaatccagggtgtggtgtctataaggcaagcactccacaactgaacttcctccctgggcctttggatgcgttctttataatcagagacaatctataattgtcagtgtctttattgtttcttggggaataatgagtgatgctaacagtgttctttgttccctgcaaatctggaggggttggctctctttttctttctattgtgaattctgaggctaggactcataatgccaggtgtgtatggcaaagctgttaattcgggccagcttggcagcttttaaagcatctcatgagcatcatcaccttacctcttcataagtgactcatgaagaaaggtctttagaatgaacaagccatagttttcttgataataattctgtcactaattttttgtcgtagcttgtgtgctttttgttgagaactgggctcctgtagccaggactggctttaaacttgcagtgttgtccagaatgaccatgacctcttctcactcctgacatccccttctgagtaccaggactgcaggtttgcgctaccacgccttgcaaataatcccattactaagtatttcttccctccaactttaaagatattcagaagtgttttaatacatgtagtacttttctttatttagctcatgtcacctgtgtgtaattcctaggaccctgcatactacttgtctttgggatctgtttgtggttgtcaaatcttaaaagacagttttcctcgtggccttcctattgtagttgtctccctttcgctagccctctgaggtttctgtctctctgatcactccctgctctgctgctgccgatcactcattgtgcatttgcagcctatctaatttttccacataataaaaaatagggtaaagattattcctgtgaacttttaattttttcccattttggggggaggggattgtttctttggaataaatgttcagaaatgggaatactgggttaaagaatacaaatatttttaaacctgatagtcaagcttcttttaaatgagattgtatcaatttacaaatttaccagcacgtataatcttctcagtagtggctataattactttttggtaaggcatgtgtaagggaatgtgggaggaaaagggccatgctgtttcaatttcctttgctttttattagtgggagattgaacatttgccacatttatttgttggttaattgtattttcttcagcattgctttcgggaccctctataatttgcacctgaccttttcaccttattttctattattcaaactcacaaatatttattaaactcttgggctgccgtctcccacccaacaaatacatagactctaatcagaccaatctgtcatgttcctctgattatgttatgcttttcctttgagagcccccctccccccagcttttgttggggtttgggtttggtttgggttttttctacccgtaaaatgcccatcccttcttttttccttaagctatgcttcctcgccatcagattcagcttcaactttttactctctgggaagtcttccctgatgtgactgtggcagacctggctcaggtcccactctccttgttccccgtcacttggtctgcatctgcctttgtagcaggtccaggagagcatgttgattgagatggacagggcaacagacaaatctagatctcacttcatttgcttgtggtttagtgccctgctctctggttccttcacctcagtgttctcaggacctgggataatcacgtctggctctatggtgcttgaggggtgaagtggaggtgcttgtggaggggggccctgttggggtgcgtggtgtacagaactctcctttcagtgcttaggcgtggttttggttgaggttgtttttctctttaagacctgcactggttgaggtcagttggaattgcagcactgacagctgggaagaagacatggggtcccactcttaaccaagaaactgtatttcatacatactggcaaagggaaagtcagttttctccaatggagtgtcaccaggtctgtcaaccactctccggggcaggtgccatgctcaggagtaattagacaatacaaaaggaatgccatgcattgtttgctatttatttgtgtgtgtgggggggaactttttgttttgttttgtcttactgcttttgttttattttgttttgtaggccaagtgagaatgcttgtttatgttttaaattaattgcatgattccacccactgactcagggtttgtgttcttttgcttcaggattcttcctttttgttgttgttgacattttgagataggatagcttggtcggccaggaactggctgaggcccaggatgactcctcatctccttctagcacctctggagtccatagcttgtacgcctgtgtgccaatgtcctcgcttatgcagtactagggattgacccacagcctcccaaatacctggccagcgctctcctgacggagccgtagccgcgggatgacctgtcctcgtataccttagacatggtgtattgtctcctatgagttaatctgtattctcaaagaaatagcaaagagaggactgcattgtgggtgtagtgagttcccagcacactgtgtagtcgctgattcagtagtgctgggtggtctgaggagctgggaaaggagggcactcagagccaagggcttgactgtagtttaccagcagagctttctcccagggccaaaaaaacagctaatcctcacaaggcgttcaggacaccattcactgaaactaatgatactgatgggacccacgaatcagataggaacaaggaatccagtgaccaaacatgagtggcattaacatgagtgaattgagaacaacatttcctatgtagtgcaaagcttaaaggaatacgaggggaagtggttgctttttgattattttgaagtaaaagttacaggagagaaagactttctgaattctctttccccttctacatctcctacatctgcttcctacttgctattttataaaaaaattatagtgagtatattttccttgtaattattaagcagacctgaatagacattggtaaagtagattacatctaagaatctttagcttacctattgaagctattggatattattggcttctctaggcttttatataaatagtgagattttaaatagtgaaaaccatgttaatttttaggatcattttccttagtagagactagtgatggataagctgggaacaaacttgtgtagattctaaataatccaaaaaggaagcttgaaatagttaacacttttggatctatatgatcattgtgtttgttttttaaaacaaagtgcttgcatttgtattctccattaaaaataaacattgagttagatgcttgttcagccaagtggagtcagttatccagtagaaatcctaaaaagattcaaattataccaccagattttactttcccataaagtgttgtattcactaatctatgtgaggaacctatacttaataacaccataagaagctgtaaatgaaagcagaaagctgactcctgctccgtttaactggcagctcctgtggtttggattcgcagcactgttacgccctcattcacaccctggatttccaagcgttttcaaaaagctgaaatggtgactcaagtttgtcaacatgtgacaggttattttcctttatttaaaatgtaagcaacagaaattattctggatgaagctctccacttattttagcagcagcagatgctctctgtgatcagtacgtctactaaagaccagcgctttgtgcctagaccgcaagcctcacaacttagctttatgcctttccaggcgtaccagtgagcgaataagccaacatatcagtctagtctggcttagctcagcactctttgattttttccagtctgtttgatgtagaggcttactgagatttatctactgagctgttcatagtctgtagggtcagagccctggctgcattatataagattccaccagtgacagaggacatgggaagtctctgtagtgtggatactttagttccttgtgttgctccttgttttgcttttgaaaaatttgaaactattctcaaacttttattaatattcagtattttttcattttctaattttatactgaaagccttaaaacagatgtgctataattggttcagtttactaaagattgtttcaacatttggtagaaacagctatgcaaatgtgaaaacttttccaattatttgaaagagaaaatcaaaataaaagtatgcagtgaccagttgcaggtactggctgtatgcagaggcgaatgtcctcttattctgctatttctggttgcaataacagtaatgtacccagcgttataaaaagcctgcagactgtcttctccttatctcatgtgttcccaggcattcccagtaggataagtattattgccccattccagatggcagtcttgggagtttctgtgattaatttgctacatgtttcatatctgctgtgatgcagagctggtgttaactcctaacctagttatttttccattatatcagagcttttttgttgactaatacacaccatttctaaaagcaacagagttttgctagtggtttgatcgtgtcctctttcctgagaggtggaataaaattgctcaggctcctggagataagagcattatgtcatactggaggactgatgacgtacattcatccctgcttcactaccctcacatagcaaacaggacagacagacgtctgaggcttgtgggattgtgttagtattgtccacacaaccctgaaagagtgcctggcatagaggagatgcagagggcattttgctgttgctagaaacatttattcagtggacttgctttgcttgctgtgtgcagagtaatgtgctgagcatttaagtctttagctttaagaatctccgagctaagggctggagagatggttgatgaaagcacttgctcttcttacggagcctgggcttggtccccataaacaccttgatggctcactccaggtctaggcaatccaacgccctgttcaggccgttgcaggcaccaaacatggatgtgttacacatacatacttcaggcacagtcacatatgcaaaaataaaaagactctcagagtcaactagagtaggtgcactccacattgcaggccccgacctcagagccttttgtagggaggggtttggaagcagggtgtgattgaagattatcccgtaaaagtcagggtgtgagcttgagaaatatgtagaagtcaggcaagtaaagaaaactgtggagtagtatcatttatagaggtgttgaggatggttgtgtgataatttgcctgcctgccttcctttcctatctctatttcactctttccctccctccctctcacctgcctttcctttctccctccatccccacccccagcccccaggaatttatgagtctccggctaccctctcgctcactatgtagttaagatgacattgaccttccgctcctccctcctctaccactggttacaggtgtaagttaccacacccagcttgttggctctgggaatgactatgcttgctaggcaggcggtgtagcagctgaacatccctagcctcctgagttcacttttgacccaagacttgagacgctagagggagagccaatggagcatgtccgcttggcagttatatacacagggtctggagcccaggagtaaggtctgcctagacaaaggagtcttccacgtgtagctggtattttatgtctcagtgagtaggcacaccaaacggctgagaatgccatccaggaagcatcgctggttaaatgatttatgtggtaaaatctctcaacagagatagactgttctagtatcagatttggagacaggacatgtgtgcttgtgtatcttaaaatcagtgagtattttgttgcttggattcccccgtggaggaaatgtgttcctgggctgttcatcccaagactccccaccctcacaaggcgctttagggagcctgctggttctttgcccagccattggaacttagtgggggaaggctgaactctttttgctttgttatggttttgagtccttaaatgtaattggagaaataatgacagtatccttgggattaaacaagtccaatggattttaattttcttgacaaactgtaattaagaaattgtttggggagatttgctctctgagtaggattagctcacctatgtttttcatttggaaaaaagtaggtcttgcgttagaaagcaaggtcggaggagtcgtctccagtgctttatgcagtgcagagaaaatacgtcaagctgccaggtgaaacgttcctcaagataggagaaagagggaagcagacaattagaatacgctagggaaaggattctctttatccgctgtacctgcttttctcttcaattctggaaggctctgccagcagggcttttttcacccctattcttgtcctgccaagagttgcatatttttggcaaaatgttcattactggccaggagtacacaagaaagcctttgccagagaattaagcaagcagaagtctgtcaaaacaaatattctagcttgaaaatatagtcctgtagggggaggagtgtgtagtggaggaggccagggcatgctctgaggctgagtattcatttcataagaattctgtgttctgaaaggctgctgtttgccagtgctgaaggaagcagggctgtggtacataaaatgtactgacgagcaaggatgggttcctggggatgtggggtttgttcttgggtttggtttgctgctcatctgatgacagccttttctaagagggaaacggtttgataacaaatagccttttaaattaaatttaagaggtatttaacaaaactcatgtttacatggaaaaaactctgaggcctgaggatattaagaacacataaacaaatcctcacagaaacaccagtccatttcataagcatttatttggccaggaaatgccaatttcatatgactccaactttaaaagtattcattattgattctaaaagcaaaacttgtttttccccctccatttgtttgttatataaaaaattattttatacatgaagaagagtatagattggataaacgcaagtgtatttagattccctcattatgtagatactcagggctgctacttaaaaagttatgctctgagttggagaaatgtgtttatttgttagctgacgtttctagttggacctgctggggttgggcatgggtgctaactgtattaacttcaagagagatagaaaaaaagattgcatacaaaattggattttagttctaaaggatttcctgatggaacatctacttgctgctgacaatagtttctaagaattttttaaaaaaataaagcatgctaccttgtaatatttcaataaatgttgtatgtgataaagtatgttaaaagccgggtgtggtggcgcacgcctttaatcccagcacttgggaggcagaggcaggcggatttctgagttcgaggccagcctggtctaaaaagtgagttccaggacagccagggctatacagagaaaccttgtctcaaaaaacaaaaaaacaaacaaacaaacaaaaagtacagttaaaaacatcaatataatattagtaaaatacacatcagttcttccctcttcctggcagaacttaggtctgctgcctaagtcactcagaggatacgtgcctgagaacagagcacaggggaagtatttctgccctttgagtctctgacttgatccactttagttactggaagagaggttaattaatgtaaaatttctttagttttagtaattcagaagattaaaaatcttttgagggcttcaaaagatcatggtgcaccattggaatttgcctttagtaaatgtaacatttgttttctaaagaattataacaacatacttaaattccagaacagtaagcaaaatagcttaagttcactgacttgaaaaaacattcttttatactgcacggttctaaaataaatacttaaaagaaacagagagcaagccattctatcttggatttcattttccttcagatagaacagctagaacaaacattcttgctagttagcattgcctgtgtttttatgaagttaataactaagctgtcaatcacgccctatataaatacggaggttgaatgctttctgcttcagaagcacttttatttacaagagctgccagccaagatttccagagcactccacgggctgtttgctttgatctgtgttgagggctggtctctttatacctgttggtttgctctttatgatacctttgtgtgatcaggtattgggagagcagatgtgcagaataaacagaggggaaccagagctcaagagaaaccatgtaattatgcaccaacagctctagagcagagaatattttcccaactccacttagctgctgttatgacaagaggacagatgtcatggtgttcaccctggggaagctggagctttgctttaagcagccactttttatggagcggtgtgcatactctgactacagcttgcagaggtggcgcaggccctccctcccacgcctctgcctttgcccttttctcacttgctccttccttggggaatgtttaccacatgtctccgaccaaataatcagctctctgttgggagaactacctttgaattttcaactggaaatgtgccttttcacggttaaggccactttcaaaaacagaatagcgttttggtgggtccctctgtggctttgatttagagtttgtccagtaccgtggggaactgaacactgaaggcctttgcacccccagtgccacccccatagtcttcagtgagtgaaagaagggcagaaaggaagaggaactgcagtgcttgcctccaaaatgacctattctgagggatttctccttttaattaaagctgccttagcatttcccatgacgtaattacatttgcatattactttcctctaggaaacttgatgtttgaagtttgtaacttctggttttgtttgaaactagaaaagttttccctgtgtgttttaaactagaaattttatcatcacttaacaatgcctttggagggaaggttggttggttttcaggccctcagagggttctctgtgcatgggcaagtcctcttcatactcactgaccgtctgggccagcacttttccctcctgtgacactggcatgactcgggttttcaatggaagggcgccagtgcttggctccagggttagaaaggaggccttttactaatacgttttctccttgctttctgcccagaaaagttctaaatctcgtatttccaacagttactattgcagtttgttgggcttctggtgtatagcttttaaatattgctgtctctgatagtcagcagagggtaagtaatgcccaggtacccggttgtagcaacctcccttgggtacttgcagagtaaaattatttggtaaatgttaaggtagattaaagcttggttttgaacccggttctcctgcagagccttgttggggagcaaagaagttgccaggaaccagcacaaactagctcagctgtaaggctatctatagcctgtgttcaggcagaagcctcctaagaggtaggaaaaggctgacatcacctctgagcatctttaagccttagttgtaagtggagctacaggacagccagagaccaggccagaggagccagaagcaattacagaagatgggccatgctgcgaataccagtgaagaaactgctgctgcagatgtgccagggatggtggggggtagaggtggggaccctcgagccgcttagttgaccgatcctgccaagtcccccccagtgtttttattttacattcattcagggttcaagcctgtaattaaattttctgaacaaaggacctattaagttacaccatccagattgatgactgacagttcttccttcgaggtacacaaggaaatctgtagtgtgtaaagcaaaatacagactgtagtgaggattgaggaggagggtgttacagcggacagcagggtcgccgctccagcccttggccaggtgtctaggtttaccctaggatctaaaacagtgtcggtgataggccttgttcagatatccaggaaaaatatgtgcatttctaactagtagtgtattgttttttaaaagctctctctggccagttcagtggctctgtgagtaacgacaccagcacgtgtgatgcttttgtttgacccctgggagctatggtgtagagaatccacttgtacaggttctccttgggccctcacattctgtgacatatgcaggcacacccgcagacacaagcacacaacactcacacacttaaacagttatttcttcaacagtttaacttaatattattttttgaaatagggtctcctatgtgaatccggctgcctctgcctcctgagaactgggattaaaggtgtgtggcaccgctcctcccagccctaaataaaatgtaatttttaaaaatctctctccacttttgtgtaggcaccatatacttgcttaaaacattttcgcagtgacccacacacaatttatgatgtttattcttgggcccaaacttaaggcagcttcccagacttggagagctcagggctcagctccattagcttggcatctaggccctccacatccacacccatcctgtccattgttccaggcaagccaaaggcatcctggcctcaaaagcatctatgctatgccttttattaaaggctttctcctcccctctagcctcccagccgtcctaggagagggaaatccttgctgacctttaagaccaagcgttatctaagcagcacatgggctgacagtgtcctggtttaccccagctcatgtgtgctgaaccttcctggagagcttctctttggctcttgcttactgctcaggcctccataaccatattattcttctccctctccccctggtccccctggtccccctggtcccctttcccccggccccttggtccccctctccctccttctccctctccccctttccgtcagttttttcttttgcttttgtttttctgctcctttatgcgttgttttgtaagtctgatttaaaactcctgggaagcagaggtagaattatttgtgtgtagcaatgtcctctggagcatttacattgtggtgcttgtctgtcagctgttgactctgctctctgtggctcaggccagggctttggaaccactgggcacccttgtaccaggggtactttttggcttgtcagcacagtagtggagaagctagacctaattctgtccaggacagaatctaatttccaaatctttacaagagcagaatggtgtcacagtcacacactggagcactttcccctgggcactgccaactctttcttatgctgacgggctgacccatggccactactcctcagatcttatttcagctttctgggttatttttatttttaattaaaggcaaacttacttttcttggaccaagggcaagtgaatattcatgaggtgtttgctttctccactctagttttcttcggcaggtgatgccgtaggtcgggttctgtcttgacagtgattcctgctggcagggctgctgctcatggtcgtcactgacttgtccagggctagcacttgacggacagcacagagccgccatcccgcagcaggagctgcctttcctttcgtttggtcttacgagtttgaggaagatgtgtattttgccaagtcggaactttgaagacagcagtgtttaactcatctgatctgaaaattactcgtaaagtgactgcttatgccaaacgcaaagccaggtctgactagtgaatggcctactgtgactggcacagcctgctgtaggcttcagaaagactatttacacccgtctgggaaggattttataaaccattgtagccttgtgcacacagcgagcagtctttcatacttacagagcacctatgacactgctatagatgttcattcattagttttttgtttcagttttttttccccttcttggagctaggtttagttggaggctcataggaagccatgataagcaatcataagatatttgactttgtttttcgagacaggttctcttgtcgtccaggctggcctggaagccttgatcttcttgcctctttaacttactctcaactcaagtgtgcaccacagcactagccttcttattagtctgcgttcagtgtctgctcgggtttctcttagtggaccatcagctcctggaaggtgggaagttgtccccttcgtcgttgtgcctggttcagctcagaagtttgatgtataaatgagggtcttcaagcaagcctgtaagtgttgcggtgagggcactggacgtgtgtgccctcatctgaactggtagggaaagaataggagtcacacctttgcagagtgtgggataaaaatatgccaaatgaaatagagcagcttaggatgagtgggggaccttgccagccaagcttgagggcataggagcaaggcaagtgtttgaaagtgtggacttaagaggatcaggtttgctttagatgatcattttggcaactgaatggagacacactgtaactggattggaactcaaagctgcaactgggagatcagtgtgtttacctgagtggttttgctgcttagaacagtatagacttttggaagtcaggatttgggatttcatataccagcagtttgtttgtttttttttattaagagtcagtgtaaataagttttttttttacagtagaacttttcatttagctaaagaaggacttactaaactacttggttagggtagtttcatgaagtgaaggatatttcatcatagaaacatacctgagtttaaaaactgttagctatttaattttttaaacattttatctttgtcttgcgtgcgttcgtgtgtgcatgtgtgtgtgcgcgtgtgtgtgcgtgtgtgtgtgtgcgtgcgtgtgtgtgcatgtgtgtgtgcgtgtgtgtgtgtgtgtgtgtgtgtgtgtgtgtgtgtgtttatgtgtgcatgagcacctgtctgtttatctgtcctttctgatgtgttaccttgtttgaccccagtgttaactagaaaggttgggtagatgaatggttattcctgttaaatagaatgggaaactagattcagaagttgagtggcttaactacatcacatatctgatgaatagcagaactgaaaccaccattcagtatttgggcatattgttttggttttgctcacaatttcggggaataaaggaaaaaggaaaagaaaccataacctcattaggagtcatattttttttttttttggtttgtttgtttgtttgttttttgagacagggtttctctgtgcagccctggctgtcctggaactcactttgtagcccaggctggcctcaaactcagaaatccgcctgcctctgcctcccgactgctgggattaaaggcgtgcgccaccacgcccggctcttttcgaaaacttttaagagtgatacattaaattgtttcggggtaaagtcagctggtggtcagcccattgtgattataaaatgatgtaagaatggttttcttttccaaggatgaagtaaatatgtattgtagtatttgcacctttttatatgcttgttcaggaatcgaagtgtggatttactattagaatggactcatcaaaaggaatgcacaggtataccagtgtacaagcagcattgaatgcatgcagtaccatggttgtctcctttagtcactgggtctgtgtgactttctatgtctgtttgtgtctctgtgtgtctgtctgtgtcactgtgtgtctgtgtctatgctgtctctctgtatatttgtgtctgtgtctctgtgtctttctgtgtgtgtctctgtgtgtgtgtgttgatatgtatgtatgtgtgcatgtatgtatgtatgtatgtatgtatgtatgtatgtatctgtagttctataagtgtcaactatatctcatttggtagcttcctcttttttttcccctttggcacttaatatgttcagtgttgagtaaaacaatttagtgtttgatccctgaaaattataggtgttaattttttcacagtgctatataaaattttatgacaaattcacattttaatcattttttctggttctgtatgttatgtattttgaaaagctatctatactgtaaaaacaagtgagttgtgttctctgaactgctggaccctggtacattggccttcatgataatttatattactatctgttttcttcctttcatcttctcttcaaagtagggaggcaggggaagaggcctaggcgcgggatccaaggccaaagagcactggtttataatctgtggagaagaacaaagttagatttgtggatgtgttctctctgttctcacagaagctccactgagcagccgtgactcgtccatcttaagaaaaccagatgggtgggcgcctggcaaggctgggcagatggctccagtcctgctgcagtggtcgcttactcctgcatgctggctgctgctgctgctgcagtgggagcttacttctgcacgctggccttctctcaggcttttctccctttccacagatgccttctccattactgtcccaatacagatgaaaagtagggaacacggtttcagatttttattccttggctagtagcagccttttctaaaataaaattttcacattacttataaaaattgccactagaataggcttaatatagacagatatataatatagacagacagatatataatatagacagatataatgcttgagctgccttagtttcatggcatgttattagattttcctgagctcatagcgttttcttttcttttcttttcttttttttaaaagatttatttattatatgtaagtacactgtagctgtcttcagacactccagaagagggcgccagatcttgttacagatggttgtgagccaccatgtggttgccggaaattgaactcaggacctctggaagagcagtctgtgctcttaaccgctgagccatccctccagcccctcatagcgtttttttatgaaatataattatttaatgaggatggatgttttgcttcatatttgtgagttttgaatgttttttaataattggaatatttctagacttaggatatttagcaggcagtggctttgtaaggttgggtataatgactcactgacctccgagcgtcctgagtctctgtggaagagtaagtggctgtgcacagtacttttgacatgcatgcagctgcactaccagatgacagtgagtgccagtgatgctcagtaacaagtcatgacgtcagcatggccattgggaccacaaggcacagtatgcgagcactgggtctctgcacgggcttcttgcctccctcctcttagtcctccatttctttgaaatcatggccagtttgggctgggggatgaaaaaaaataacacttaaatttgtacttagaataggtgttctttagagttacatagcagataatttatgtagacaagtgtagactagaataaaatataacttttaataaataaccttacaccatgctgcttattcaggtggtcttcatgtgggtcctttggtggttgctaacctgctttctggcttatacttgctactctatagcatttagtgtttctgtttctaaccgacaattactttgtctgctttggactgtgaagagggagttgggggatggacagggtacctccatgtagataagttaggaggaaataagtcctataataatactgacaatactttcagttaaaattaacaatgataggagaaaagaataaatcaagaaagtaattcattggaaatatacatagaggtcagggaccaaaaggcaacagagcaagatgatttttttcctttgagtctttcctcccatctttgttgagccagaatgaccagaagtcatgattttcttgccttggcctcctgagtgctaggattaaggtaggtgccaccatgcatgcctctcgagagtgagagtcttaaagcagcagtgtgaacatcagaaagggaaggagatttcacaacatttcatgcatgcaaacgtttaatatggtgacaaaggcagagggagagaattccgagaggttaaaatagaaaggtgggggagcaaaaaatgaagtcattattccagttgattcgacatctggattaagaattcagaaaggagaatgaaatgacaagaaattatgatagatacagcacaagaaaatctagaacctttggaatatgcgtcctaacacagtacgggaaaggcagtgcacacacaccaaggccctgatatttagagttgatgatggtcgccagcgaggaaaccaccaacagtttacatactgggaaggaagcattgcacagcagcagccgtagaagtgagtggagtggggtagggagggaatgactcagctgtgaggggtacttgttcttgcagtggacccaagcttggctcccagcacccacgtggtggctcacaaccacataactctgcttctttaggatcccaggccactttctggtcaacgtgggcatcagccatgcatatagtacacagacatacggacagatagaacacatgggaataattattttaattgaaaagaaaataatagaacaatatctttaaaattccagggatatataattttattcccattttccatatttggctaaaattattaaccaaaattgaagattaaaaaatgtatttttatttttaaaaatgtgtgttttaagtaaggacaaggaagaaaatatttttttcattcagcttttgagtcaaaagcatctaaacattgattgaaaacatcagtttgcaaacagcattggttaactggtttgtgtttgtcattccttcagaacaccggaagacagtatatgtacagtttgtacaagtgtgtataggatctctatgataagcaagattggatgttttgctatgtatttcttacctttttaaaaatgggcaaataatagttgtagttaatagaaaattaggggaagagaaaagaaacctgatttattcttttatttaaaaaattgtaggaactgcacggtttacctgtccctctctgggcgctgtgatagggagctgaagagaaagcactgcccggcctttgagggacttgggcctggttatttgggaaaacagacacggaaggaaatgggaacagaatggctccagtcagataaagaatgtccaaagccaggctctgcaggatctcaatgggcaggcaggctgctttggggccaagatggttttctaggatccacagaggtggcagcctgatttcagagcactttcaaaactcaactttcatgagaagagcaaacccaagactctgacctgagaatgtctaatttaatacatgttattagcatttcaacagaaactgctctacttcccgctgccagttgcaggagccaggggttaaatgttttcgggggttttgttttttcccataaataataataataacaacaatgagctatacttattccagactatttttctggctattcaaaaaacaagtggcttagatgcccaacaatgttctttctgcaagtctgccaaacactggcttttccctttagtctgggatctagctaatctgtggaacattatcctatgttttgagagcttaccgacaggtgttgtgtggggagactgaattctctggactgagatagacagcactaagcaggaacttggttaattctgtggagaggagactcatactgtatactgaatactcggagttccctttcacttagtagttgggaactaactccgcagacatcacatcccactaggtatggacaacatcgaagtagagtagcatttacccagtgtgtttgtttgtttgtttccttgctttgtttgtaaataaatcttggtctttgaatccccagactttttttcaagtgtcctgggggaaatgaagcaccgagcctgattaagagcaaacgcatgctcctggcctcattctgatctaatgtgtgtgaaagttagaagtttggggggaaacaagttgcaaggccttctcttaggagcaaaaggaggccaggctgaggaccgccttcacacccctcctttcagcagaacagctgtgctttgttttagtgtggtaattcgtgctgccatgatagcatgcacacaacaggttttaccatctctaccatttgttagtgcacagctgagtgattgatagaagcctctttcttttactctcagcattccttggttgtctgtaggctttttatgatttctcttttataatccaaacaatttcagcccctaacactgcttttttaaaaagagacaaggtcaccgtgtcgcccaggaggattggaatctctgaccctcctggctctacttcccaagtgctggaaaatagcacttccacccaagcttagtcagtgcgggaagtgaaccagctgaggtacatcccagcacttgagaggcagaggcaggaggatctcagtgagtgtgaagctagtctgacagtgagttacaatctcaaaaaaaggtataaattttaaaagattatgaaaggaaccaaaattttgtacttgttacaaatctcattccaaagtgaagaaaactaaaatgcaaaaacaaagtttttggttatttttttaagaaaagtgaggtcataaagttcaatagtgctcgctttcttagctgccaatgcagctttctgcctggcatgcatttcttgatgtgacttaggtcttttttgatgccttttcatttcttctttccccattctccaactgcttctgtcatctgtttttatatatttaactttttactggctctttgtgattgccacatcctgcatcccaatcccactcaccttcctgtcctcttgcacctgccctccaccctggacctggccctgccagctcagtcgggctaccggttctccagcttgggaatgaggattaaaaagaaaaaagacagaggacattatagcaacgccttagtccattctgagactttcccaatccactttttataccattttaattacatgcaagtattacaatgagtagtacaatgaggaatcaagcaagacaatagtcaaggaacaggcaagacgataaacacaaagccccatgatcactccgctgatagctgtttcaaaggatgatcaaaatatctgagcctacttctttgttctaccttaaacttagattcttacttccttgtccttggccaatgtcagatgactgcctgaagcccatttccttgtcattggccaaagtcagattcctgccaggtggcaccccaaaatgctctccacacttcagcattgccctggctagctcacccagtgcctcagtctgcaaaggacacagagccaggtctaccactctcatgccctctggccatttcacccattcccaaaccagcagagccagctctattgtgctaccgaggtaaggtgcaatgagggccttctcttcctcatgctgttgtagatgtggggctggcagctctcccacctgccgtaggtggcaagggacgagggggttggtaaggagggcttctcaccctcacccatactactgcatggaagacaggtgtcagtgccagccctcccaatgctcacagccttgggccagctcacctgcaatccccacaaccagtaccagctctactgtgctgctcagaagcaagtgagggcacctttcatcaatccctgcacaatgggttgtcaggataagaagcttgcttttgttttgttttgtttgttttgttcttagaatattctgatttttccctcccttttttggtgacagtatcttgaaatgtactctggttgtgaagtcagggttcttctttgtccccatgtgtggtgcaagtcctggaaagtgtcatcacctcaaggtctccttattttttttttcctttttttaaagaattacttacttatttaagtatatgagtacactgtaactgtcttcagatacaccagaagagggcgtcttttaagtcatagttctacacatcagggttcttggttgatggttttgtttcagctaccactctgacttccagaatatctgctgagaagtctgttggctctgcctcaggctcctgtggggtgaaggcctgcttccctttcacggcgtctgctctcttcatgttgatgagagcatgcgtagggtgtagcttgctgcttctccgtccctagagtctgctgagcttcttctatgctgatattcacttctattcagacttaaggattttgcataagtttcccttggtccctatccttgcccctttctcccttttcgttagaagctgatggtgttaatggtggtctccttggtgctgccccatgggccccataggctcagccagtgtttttcaaatcttgtttctgttcctctgacacagtctgtcagttgtcctgtgtgcactgtgagcattattctccttttcctgtcagtgaaatttccactttactctcttttttggctctagaatttttttccttatttgtttttctctctgtagtaatatgttttgttaatacacacacacacattttttactttttctgagtctttctttaattcctcaaacatctttaagacatttgattaaacatctttgtctagcaagtccacccatattggtctttcacagggacagtttttgtctttttttcactgtgaatgagtaatactttcagattctttgtgtgccctcatgccttttctttctgttcaaaactgtatactttagtctagtgtaagtccagcatttgatcctccctggcccctagagctgctggttggactggtgttttgattgttgaaaactgtctgtgctctaggaatcagcctaaggtaaacaaattattttcaagtcttttaaagcatgagccttctcagggtatgtgggcttactttcatagtgtgtacacacacacacacacacacacacacacacacacacacacacacttgcttctttccatgtctggccggagaagctgaagccaggttccaacacatgattctttggacagaagcactctagaccgtaagcccagcaggtgatcttctgaggtgagtgcgtcacttagatacctgaggaagggacagaaaggacagaactgtgtctgcagaggcaaagactggagtcatgtagtcacaagccaagaaattttggccatcaccaaaaacctgtaagagctgaaggagggactctcttacaaagcctcccaggcctgctgataccaccagtactgatttcaggtttctagcctcaaggacacagtgattcaacgggataaaggagcgcatatgttgcttgttactgattgttttccgcagtccaactcagtgcctttaattatagcactcactgcacaacaaaccaccccaaaatttagtggctaaaatagcagcttataatttcccacaatgttaggggatggctgggttcacttacacagttctcttgtactgtgtaacaccatctgaagtgtcatctgaatcctgggagcactaatgactggaggctgatgggacttctccagcagggtgaatacagaagttgccctgcttttcaaaagcctaaagtcagtctgtacagtgccacttcagtgacctgcgattaaaggaagtcacaggcatcctggggacaatgagttgggaagtaaacctatctcttaaaagaaaggagataggaggagcctgctgctcgtgtctggcccaggttgcagagaatgattacagaatcaaatatcgcccagggactgcttgctgctgacaattttgagatgataggcttcaacaagaaacgttttcttttaaaaaaaaaaaaaaaaaaaagggtgtgtgtgtgtgtgtgtgtgtgtgtgtgtgtgtgtgaaggtgcttatgtgctgctgggtacatggggacatcagaggctgaggtgtgtgtgtgtgtgtgtgtgtgtgtgtgtgtgtgtgtgtgtgtgtgaaggtgcttatgtgctgctgggtacatggggacgtcagaggctgaggttggctcatgggagttggctctctccttcccctctgtgggtcctagagattgaactcagtttgtcacacttgggaaaagtacctataccttctaagccatcttgtcagcccaataaagttgttctaagtaacaatccctgtaagaaaaaaggccatagaagctgttgagatggaaacacacttaatagagcataagaaaggcgcactgactcgcctccctcccggcagtgaaatgagtggaccaggggcttcccagggggatgaccagcagccagaacactgcagaaccaagatgtctctcctggatagagtattctaatagccagcttctgaaagcgagggttagaaaagcattcctcaagtccaggaacctggcagatagctccagaagacaaggagggagggcaaggaggagagaaggtgggagatgtgatccactttagcgctttcagagaggtcctgcagcccaaggcttccttagtcctcttagaaccactgtggggattgcagaggcttgagggtttgttttggtggtgctgagggttaaatccaggcccttctatgtgctacacatccttcctaccttcctcccttccttccttcctaatttctctctctctctctctctctctctcctctctgatggtattgttgtttagataaaatgtatgtaggtcatgaatggtctcactcttggtgattcacctgcctccacctcctgagtgctgaggctgtgggcaggcaccagcaatcacccaggctttatctctgtctaattgccgcataattgctctcattcatgcactgaccttgaagcgctctagggtgtgtattggtgtagctcagtcttccttggggagaagattccaagagcagagtcagggatggtctggcaggattccaaatccagatctctttttaatgagttgtttgtgttttattgatttgcatttgatcataccctttgaaattcatgtgtatgctttgtcgtctttgcaggcttgtttccatttggggacactgtttttcttaaaatgggcttgctgttttatcagcaatcttagctaatttctctcctctgggctggttttattggccagaatgtagggaacattttaatattttgttgggctcccaattgaaacaccaactgcaaacttccatgtttttgccttcatcctttatttccacgtaacagcagagtttatggtgttcactcctagacctgggaataagtcctgtttttcaaagctgggcagagcttccccctttgctgttgttttcttcttagtcctttgtgcactactgtactgatccctggtctgagatgactgggaatgatgtgagctgtgtgtgtatgtgtgtgtgtgtgtgtgtgtgtgtgtgtctgtgtgtgtgtgtgtgtgtgtgtgtgtgtgtgtgtgtgtgtgtgtgtgtgtgtgaactctgtgtgagtcttgagggataacttcttttttttttttttgtatacatgtttaactataggcccttttccattgcattattatttgcagagaggtgcctttgggttttttttttgttgtttttgtttgtttgttttgttaagacagagtttctctgtgtagccccggctgtcctagaactcactctgtagaccaggctgcctgcctttatctcccaagtcctgggattaaaggcgtgcaccaccactgcctggcccagagatgcctttgttaaaggtccaaaacacagacttctatattttgacttttcctatatgtagcagatttttaaaaaaacatttatttattattataaataagtacactgtagctgacttcagacgcaccagaagtgggcgtcagatttcattacaggtggttgtgagccaccatgtggttgctgggatttgaactcaggacctttggaagaacagtcagtgctcttacctgtatgtagcagattttaactgcagagtttttaagatagcctgaagtgtgattcaacggaaatacttgtgagggaaatatatgtgtggggggacaacgtttggaggtcagttcttacctaccacattcttttttttttttttttttggtttttcgagacagggtttctctgtgtagccctggctgtcctggaactcactttgtagaccaggctggccttgaactcagaaatccgcctgcctctgcctcccaagtgctgggattaaaggcgtgcgccaccccgcccggctaccgcattcttttgaggctgggtctctcttcttcctgcagtgtatcctccaggtttgcagactcactagttcccaggtattttccctgcctctgccttccatctgacagtgtccatgctggtgttacagacacgtgcttccatgtcagttccggggctcacacttagggcactaggcttgcacagcaggtgcttttatgccctgagccatctcagtctatgtgatgcacaggtattccaggaggtcagaggcatctaggatctcttgaagccagagttctaggtgcttgtgagctgccaattgggggtactctgaaccaaattcagtacaatatatgttcttaactgataagttttaaatttttttctatgtgtgtgtatatctgtaagtatatgctatgtgtctgtgggtgccctctcaggcccctgtagttgcaggaatttgtaaatgtggtgctggaaactgaactcaggtcatctggaagagaagcaacagctcctagtctcaggccaagtcctttaaagctgttaaatcctaggctggattcagaggataccaagtggccaacctcagatgctttcaccggattcaagggctactgcagcacaccgcgattcgctgtgcaatgtgcagacagacctcatggcatgcaggacatggctgatttggaaacatggacaccttcaccacagaaactcctcccctcagcttgtctctgagcagtcctttctgatacacgtgttgtcactagtgcagattttatgtagtgttgtacctaagttgtagtatgaatttttgatagttacccgtgtgactagtttctcagagtagccaggccagcatatgcctatgaactatattttggatgccattttttgctgtcctatggtcttaattggggaagtttttgcagaagccccaacaggcatttccttggttggctaacatgtccttacatactaagagcaagattgacatatgtctggcacaggctgacagctcctcagtaatgctgacttgctttcacctctgccctggctgtcagttttcaccaagtctgcctgttttatcctgctcacaacttagggttgtcttttctctttctaggagggtgggctggtggaggatcagctcacgtgctcgctccttccttccttactttctccctccctcactcccttcctttttttctctttctctctccctcccttcctttcttccttcaatatcttctgtttttttaaaggttgttggatagttttgaatacatacataaacagatttatcttaactgccctgtcagtcactgaagaatacacctcaagtacttcttatgtctgtggaggtaacatcagcctgtttacttgttgaggtgaactagaaccaaactgtttgtaaactagtgagaaaagcgttatctgctgtgtttaataaatgtcagttcctctggagtgtctccctttgtccacggcagtggatattgctgggctgccagtgaggattggggagttcatttgttgctatttcctttttccttgtctgtctattcctttgtttctctcgctcagctagctcttaggggttcttacttgttttgagatgatcaaactcctctttgtttacttggggttgtggtactaggaatggaacccaggccttcacgagttaggcaagccgtgctttagaaccaggttgcagtctcagccctggaactgtttattgggcactagctgtgagctggggagcatatgtagtgtctgagatacactgggcttacatatgcttgggaaggtagagtgttctgctggaaggaataggggttgggaggtttcacgtgtgacgtgctgtaagtgccgtgatgggagcagcatcctaactcagccccattcttcatcgtggatgtggttcttttggttttaaagcctgtgtatgtggatttgtgtcatgggacaccatatgtggaggtcagatgacggtatgcagaggagcttggttcttactgtgtaggtcttgtgattgagctcaatcacaaagcgtggcagtaaggaacttttcccgctgaactgtcttgccagccctacaacagttcattagtggagctgtttcgaagagaatgttttaagagttaaagcctcactggggggtactaccctttgaagggagcaaagaaatggggccctgagtcagttctcataagaacaaatcgttgtaagactaacactgtatcttattagggcttctattgctatcataagacatcatgaccaaaaacaacttggagagtaaatttagttcagtttacagttcctcaagattactgatggaagtcagggcaagacctcaaacagggcaggaagcctggaggcagaagctgctcactggcttactttctgtggcttgcttagcctgacttcttctagcacccaagaccaccagtcctacatcagtcatcagtaaaaaaatgtaccacagacttgctcataagctactctcatacgtgtgttttgtcagttgaggttcctccttccaaaatgactcttgcttctgtctggttgacataaaattatccagcacaccctgacttatgagttgttctggcttccttttatacatctgcctcgatgtcctagcagagccaagctgacactggtgccatatctgtgaacctactgcatcatgaacagaataaacttgtttcctttgtgtagctaagaagcctcaggtattttgttctatcaatggaaaactggacttgagataacagggaagatgtcctagactgaagcttgcctcagtcaaaatcagaaggttcatctagaattagcctggtaaaagtggtggtaacatgggagatgtctttccagctagggtacagcacttggcacaatgtgtaggctaacaagagcaccgaatgatgatgctctgtatggtaggtatagaaaagaaatgtcaagaaaagtaagtcagccatcaggctaatgactttagatttttctccaaggaatcagtagggagcattaaccttgtgaggttatttgccactttgatgagaaaaatacagtgacatgcaactttatctttttttcaaaacctatttttaatgatggtttttaaatgctttaacttcccttgtagccaccacccaccagagatagtgggaaagaaagtggatctccttagaaagggtctttggagcaactcccatctgtgttgtctggaaatcagcagtttagttcacaggttacttcatggatgcaccagcagtcccgttcaggatagcaaacacgaatcagcgttggtgccactacctagcagagacagccaggcctcagcctcagctccagtaagcaggacagaccaggaggccaggagaagttctcagcaatgcctctctcatcaaagtaaaaatgtaagaccaacaagtatttcatagctagctctactagcaaacccagttctgcctccatcactgtcgattcctatttatactctctccaaacatcacatgtcctctccgggtcttgctttagcacatgtctctgtctcagctaacatcactcaaccaatcagtctaaagccacagaagctgcaagaaaccgcagcactccaccagaagtcgttttgtgtgtgtgtttctttggagttctgacaaatatagctcaactacgcagtataaggtggatcagtacatatgtgttattatgtagacatatagaatccttcatcatgtccaagcacatgtcctttcatgtgcttgctttagcagaacatcctttcacctgtgtctgctttggtaaaatgttccttcatgtgtttgccccagcaaaacatcaaccaactttccaaagaacccttaagtttccacttcagtgacatggtggttgtcattgtgtagcaaatgagagataagcctcttacatgctagaagaaagactcagatgtggtctaaaatggtatgtggtcttggtcttattattattattattattattattattattagatattttcttcatttacatttcaaatgctattctgaactcccctataccctccccacaccctactccccaacccacccactcccgcttcctggccctgacattcccctataccggtgcatatagcattcacaggaccaagggcctctcctcctaataatgaccaactaggccatcttctgctacatatgcagctagagacatatgagctctggggttactggttagttcatattgttgttgttcctataggattgcagaccccttcagctccttggatactttctctagctcctccattggggtccctgtgttccatccaatagatgactgtgaacatccatttctgtatttgccaggcactggcatagcctcacaagagacagttatatcagggtcctttcagcaaaatcttgctggcgtatgcaatagtgtctgagtttggtggctgtttatgggatggatccccaggtggagcagtctcagctccaaactttgtctctgtaacccgttccatgggtattttgttccccattctaaggaggaacgaagtatccgcactttgttcttccttcttcttgagtttcctatgttttgcaaattgtatcttgagtattctaggtttctgggctaatatccacctatcagtgagtgcatatcatgtgagttcttttgtgattgggttacctcactcaggatcatatcctccagatccatccatttatctaagaatttcataaatttattgtttttaatagctgagtagtactccattgtgtaccacattttctgtatccattcttctgttaagggacatctgggctctttccagcttctggctattataaataaggctgctatgaacatagtggagcatgtattcttattaccagttggtacatcttctgggtatgtgcccaggagaagtactgctggatcctccggtagtactatgtccaattttctgaggaaccgccagactgatttccagagtggttgtaccagcttgcagtctcaccatcggaaatcatgtagaagaatgcaaattggtccattcttactccttgtacaaagctccggtctaagtggatcaaggaactccacataaaactagagacactgaaacttatagaggagaatgtggagaaaagcctcaaagatatgggcactggggaaaaattcctgagcagaacagcaatggcttgtgctataagatgaagaattgacaaatgggatctcataaaattgcaaagcttctataaggcaaaagacactgtcaataaaacaaaaagaccaccaacagattggtaaagaatctttatcaatcctaaatctgacaggggactaatatccagtatatacaaagaactcgagaagctggactccagatattcaaacaaccccattaaaaaatggggtacggaactaaacaattctcaactgaggaataccaaatggctgagaagcacctgaaatatgttcaacatccttaatcatcagggaaattcaaatcaaaacaactctgagattccacatcacactagtcagaatggctaagatcaaaaactcaggtgatagcagatgctggtgaggatgtggtaaaagaagaacactcctccattgctggtgggattgcaagctggtcttggtcttttaaaataagcttctagctgggaggtggtgatgtacaccttaatgctagcacttgggaggcagaggcaggcaatctctgagtatgaggccagtgtagtctacaaagtgaggtccaagacagccatggctatatagagaaaccctgtctcaacccccacccccaaataagcttctaatacatgcatcccaaaacctttgacaaacctacacatagtaaggcatgattccaagtggtggttcatcaatcaatatgtctgtgaaaactcagatagttgtggcaagttggagacgagaattagcataccatctgatacctggggtccaagatgacttgagtaagtggagggtagattaggcatcttatattatcactctcatcccgttcttgaggttctgtttgacaatgcatatgaattgtaagtattatataccctttgagtacactatataaatatttagctttttcgagacagggcttctctgtgtagccctggatatcctggaactctgtagaccaggctcgcctcaaacttagaaatctgcctgcctctgcctcccaagtgctaggattaaaggcgtgcatcaccactgcctggcttagcccagtctttaggtacatggaaagttttaggaatacttgcaggtcttttgcaacttgtatttttattttgaatttaaaacattttattattagaattgtcagtgtatttaataatgacaagaactgcccctcattacaccactactcggccttggctgtagtcagcattttgcctatcttcattcttcatttcctggagtttgtacataccatgtcatttttcctataaatccatttggtgtacatgattaaagaaatttaagaagaaataccatgtgctggagagatggctcagtggttgagagcattgactgctcttacagaggtcctgagttcaattcccagcaaccacatggtggctcacaaccatctgtaatggggtctgatgccctcctctggtgtgtctgaagagagcaatggtgtactcatatacataaactaaataaataaatcttttttaaaaagaacaagaagaaattccactgttataatcaccacatctggcaaagttaattcttcaatctgcagacttcctttaaagttctacaggtctttctgtagttgatttattcgaaccaagaaccaggcaacttgtatacattgcatttagtctgctttagctcatctctgtgaatgtttcagtcttgaaagccttttgttttgtaatactttatattcttctgctgctgttggcttgtttgtagaatttggttttcttatgcagtgtacaaaattgtgagtgctcttgcaatattgtttagtttgttttattggactgccatatttctagtaaaatggcattagaaatacaacctcgattacttccagattaacttttatttaagtagaagtatttaggttctgattataatatgagtgctgtgtgtatgtgtttgtttttctgtctgtctgtgtctgtctgtgtttgtggtctgaaactctatgtattatagatcaggctggcctcaaactcatagcaatcttcatgtcttagttttccatgttctaggattagaagtgtatagcagcatcattgctgattggttttatgttaattgtctagtattaatttctgtacaagcaaatgccaataactaggaatcagcagttttgtgcccagattgagctccagtgagcacagcgtaatctaaagaggaacagatacttgtatctgctgtgggttgcttcacagcagaggaattaggagcaggagggagcccttttgtaaagagcatagagctcttttgtaaagagcatacagcttttctgtcctctgtccagagggaggcaccacgcctcccagggctcttcattatgtaagcatccttgagtggacgcttccttggacaggacaattgctgcttcagtgtacgctgtttggtcatgtgaacttctagacaactgtgcctcaatggcaccatcgtttacagctttctttttgtggtggggggtgtttttgagaccgaatttcatgaattccaagctggccttcaactctctatgtagtcagccatagccttgaaatctggatccttctgcctccacttctgagcactaggattacaggattgtaccaatacatgcagtttcatgtggtgctgggtttcaaacccacgactttgtgaatactaagtaaggactctacatctgagccccagccccagcccttatttctaatgtcgccttgatttttggagaattttctcatgagattgctatgttctcagttcctttcattaatctgactggcaagttgggactaaaatcatgcattttgtctaatacagcatttaattaattgaaactgctgtcagtgaaatggatacaaccttcagtattaacatcagctacagaccctagcacctgagatctaattagcaccacattggtgtttgtacagcagagggctccctggttttctgtattccctttccatctagccttgggcactaatccagatacctcaaaaagtctttatctcagcctggagattgaagcctcggacagtttcctatgcactatagttctgccttgggttttggagcagacctaaatgaccttcatgttcgtgattactctagttaaaactgaaatcttttgtaccctgtgatcttccttatagtagaaggaattgactgcagagtttacaaaagttgggccacttcttcacaaggagtttctatgactaaccaaatgtagccttatcacagatagatcttgactgctagtatttagagcatcagttttgaggaaggaggcaagttaaaggcagaggaaagtataattccaagggtatgcatggtgcttccttaagtaaagcctccgtctgtaattttaggagactgttttatattgggtgagaagtatgtgtttacattgtctctagcatagcctaaaacccagctggtaaaccttaaatgtcatagctcctgtcatgtcactgatttcaggctttaattttagagaatatgggtagttggtctagcctgccctcttttgcccttatcaccagccccatgcagtaacttcttagggctacagagaaagacaagatgcccagagatgtcaagatgtcttgtgcacagagaggtgacatgctgggtccagggccattgagttcagtttccttacggacatgtttgtaatgttttattttctttagttatttttattttatgtgcatttggtgttttgcctacatgtctatctgtgtgtcagggaccctggaactggagttgcagacagttgtaaaccaccatgtaggtgctgagaattgaacctgtgacctctggatgagcaaccaatgttcttagctcctgaatcatctctccaggtcccccaacacccccagcatcttaacaaggctatcagattgtgcttaaagaatcttctccacgtggaggacagacatggccattactaggtttgtagggttgcaaggtataggggttacaacagagcaacttccttggtgaggaaggcagttgagacactttcttgcctttgttccatctcctggcctagtgggtgtcctaaggttgtgctgctgccatcaccacagtgctgtctcctttcagtagctgtgacgtcacttcccctcattcgctgtctgattgagactgtctgtcttgaagggctgagtggaagaggaacacttcattctttttttttttttaaagatttatttatttatattatgtatgtgagtacactgtcactctcttcagacacaccagaagagggtatctggtaccatcacagatggttgtgagccaccatgtggttgctgggaattgaactcaggacctctggaagagcagccagtgctcttaaccactgagccatttctacggccccagaaacacttcattcttataacatcctttcaccttctccactatggctgtttatttaggaaaattacgcagtatcatcatcagactggtggccgtcgtctaattgctagagttcaggtcattgaacaggatgaagtgtgaatcttctagttaccctgtggcctaggtacatgaaagttgtagcacctaaactgtctgagccatcatggcggctatagtcaggaaaatattttaacttttcaacatagatcagtgtcatggctggtttatatcaacttggcacacggtagagtcacctgaaagaggggaacctcaattaagaaaatgcccccagaagatccagctatagggatggcattttattgattagtgattgatggggagggtccagcccattgtgggtggtggcatccctgggctggtggtcctgagttctataagaaagcaggctgagtgctgggcggtagtagcacacacctttaatcccagcacttgggaggcagaggcaggtggatttctgagttcgaggccagcctggtctacaaagttccaggacagccagggctacttgaaaaaccaaaaaaaaaaaaaaaaaaaaaaaggcaggctgagtaagccatggggagcaaaccagtaagcagcatccctccattgcctctgcatcagctcctgcctccagattcgcgccctccgtgagttcctgccctgacttctttcagtgatgagccactcattatgtggcagtgtacacagagtaaaccatttcctccccaacttgatctggtcatggtgttagttcatagcagtagtgatccaaactaagacaaccaaaaacttcatgtttttatcattttgtatttttctttatggctattttcagaccttagatagagtaggatttaattttgtatatatcaggaggggaagattcctttttaatctcagtatcagttatcctatcattattggcttgtttgttttcttacttatttggttttctggagttcattttggtttgtagaagggtcacatgcacccaaggtggccttgattttgctgtgtagctgaatggttcttatatgtctggaaacctaactggatgagttcccaactttgtactttattcttatcctgtggtagccataaagtcataagtttagaatctcttttcctatacacctatacacagggaggtgttgtggggcaataaaggggagatgggacagagacagatagggtcacagagtttttcttagaattatattgcacacattaagagtttaatcttggtagcattaaatgtttctgttgtgccccccaccccccgcgcgccttaaatgttttaacccttgtgcaaggtgcatctctatctttccctttaaggccaatcttcttatatacaatgtgatagtgcaggttaaggtgcctcaatcgggaaaggctcttgatgccaaactaaagtctcgagttcagtccctgggacccacatcgtggaaggaaggaaagaaggaagggagggagggagggagggagggaggagggagggagggagggataaagtgagagaaaggaaaagaaagcaagcctgtaagcaaaatcttatctgaaatggacctggatcttagactttagtgtgaaagccaaccacaaagccttccaggaaacaaaacaaaacaaaacaaaacaaaacaccctctgaaggaggtggagatttcttaggttgtagaatacatgaatcatagaagggaaaactgataagttgttggacttaatcaaatatgaataagaaagtaagtaggaaagcatatgtgttgtgttggggtttgtggcgtgtgtataaggtaaaatacagcctgtttgcaacatgggtaaaaaggtttgaatgaagagcacacaatggccgagacataggaagattgattagcagcgtcagtcagcaaggattgtgaacagaatcccagctatcacaaggttggctgaaatgggaaaaggtaaacgccatcagcaagggctgcagacagtacagtccttccagagtttttactttatgttgttggagtataaagtcaccgaggtgtttgggaaactatgggtttcctaaatagtatgcagatatcacattctttattctcagatattatcctaagagaagtgaaaaatatgatcaaaaaaacctcttgtttgaggatatcagaatagcagttagtcagaatccctctcccccaaatagaggtacccatatctgccagcagaatgaattacgaatttatgaattcacaccgtgggttctacttaccagaaaaaaagtcaaactgctgctgtagccaatgttgtgggcaagtctcagcaactttatgtcaaatgagaaaatctagattaaaaaaaattataaaatgtaccactatatttttgtgaaagtttaaaatagatgaaactaatctgtgacaatagaaatcaagtcagtggttgcttggggaggcaagagctggccacagaaggagcttcatgggaaatcatgagtctggatagtaagcagtgtgtgtgtgtgtgtgtgtgtgtgtgtgagagagagagagagagagagtgtgtgtgtgtgtgagagagagagagtgagtgtgtgtgtgtgagagagagagagagagagagagagagagagagagagagagagagagagagagcgagaacaagaactgactggcagtttgctgcctgccgaaatgctgctgcctaacaagctgggacatgagtctttattaataagagcatgggcaggttatgagtatttctttaatagttaagacttctgtttacttttcataataaacagcccttttttcctaaacgttttaccaagtttgaggggtttggcccacttttcagcttgagaaactatttctagcaccttctctgagctcaggaatagtttctatcaatatggaaaaggtaatccttatggtgttagctggaatgtccctgcagaagctcactctccaagtccatccttttgattgacattctccaaggcagtggttctcagtcatttgtcattatgccttaccaaatgcttttggcagtatctgtggagattgtcattgtcacagagagaagggtgctgttctactggcatctagtgggtagagacctcagaaacttggaaccattctgcaacacaaaggacatccctcaccctgaaattctacttggtaaaatgacatggtacccaggtttggcaaaccttgttctggctctcccctctatcactgaagttgaggcagtctgtcagttgttgcctgtcatcacagctcaatcagttgtgcacactgggctattcacagtacatccctctttcctgcctttataagcatatgccatcatggagataaggccacacagccaaagtacttacaactgtgtatcatttgtgttgactacgagtgtaagatgttgtagatttccttttcatctatttcattaagtagtttttctttaaagggggattataaaaggtaatgttttctcttttatttctctccacagaatgacaggaagagagtttttctctcgtttcccagaactgtacccatttcttctcaaacagttggaaactgtggccagtacagtagacaggtaattagagaatacactggaagaagtgcagacacaatgtcaagtactttattaatcatgattttaggttggactgggtggctcaggtctgtaatcccaacccttagaagatacaggattaccaccagatatgggctacataaccagacccgtctcaagaaaataaacattgggagaggaaagagctatggagagatggctcagcagttaagagcactgtcaactctttcaaagaacctaggttcacttcccagcacccacatagcagctcacagctgtatgtaactgcagtccagggaatctagtgcctgctgtgtaagcacagtacttcaggtacagtgaagtgtgctcacatatatacaggtaccgtgaagtatgttcacatatatacaggtgaaacacctgtaaaataaaaaatgtaaaactaactctggagtagatgaaatgactcagtggggtaagacaccaacaactaagcctgacaacctgagctcatttccaggaccttagtgtgaaagtagagagccagctgtcaaaattgtcttctgtcttacagacagacagagacagagacagaggaggggaggggaaaacccaaaccaagcaaggtgaaggggctcctgaggctccacccctcccagaggatctaccacagtggtgtagccgttggtaaggtacccatgctcctgtaaacaacctttcacccaggcttctctaagcaactgtaataaaacttgtgagtcacttgttaaaaacccatggaagtatatgaggatctgcagtaggagggcatatatgaggatcagagatttcatatgtaattatcactaggaatacttaatgtatcctaataaacaactttcttttaagtttgatttttatgtatgtgtctgccttcatgttagtatgaacatgcacatgggagcccacagtggccagaagccggcatcagacaggctgcagacagtacttggtgactccgaggggtgcttgctgctttctcagaacccatgtcagtcattccagtccctgggaatctgatactctcttctggtcttcatggttatattcacacacatgcacatagacaccccctacacacacacacacacacacacacacacacatatgcacatatgcacataaaatctttatgcctttaattctagcactaaggagacaggcagatctctgaattcaaggccagtctattcagagttccagaacagccatggtcacacagagaactcaggtctcagggtgggatcaagatggggtgaaaaagaatttactgttttcattaagtgaagacctgaagacctgtgttcagtcactaatatccatataaaaagcttgttgttatgccatgtgcacttgtaattctagccctgcagattcggacatagaagggccctagggcttactagctagccaacctcacttcctgggtaagtcccaggtccccatgagaaatcctatctcaaaagacaaagtggggttggcaagatggcttgagccctgatgacctgtccgtgtgccccaaacccacatgaaagtaaacggagagtgacacctcacaagttgtcctctgtgtgtcatggcacatgcacccaataataaaaactttttacattttaaaaggactagggacacagttcctgaggtttaacatccaaggttgacctctagtccccacacacagacacacagccacacacacacatacttacacacatagacacacatacctgaattatttcttcctcttattttttaaaatctttgtctacattactaaatgtacttaatagattcttaacatcctgtattactggcctgttgcagcttgctgctgtgaaacaacagctaagttgcctgtgatcaaatgtgggtccctgagcaaaaatgatcaataattttagaaatataaagcagagtcattttaaagggcattgagtcccctggggcggcaagaaatggtgtcattttgtttcagtcttactctgtagctgacagtagactttttactatggatatcttagaacatgcaactttttaatttttctgcagtctttgtactggtataaatacatataaactgtctgtaatgggaaaatgtaattatatcaatgaaatgtatttttgtcaagatatcttttctctaattgctagctagtgcagggagggttttctggttctagtgagtaatggcctagtcatgtttcctcaaagccatcagacagggagagcttcccatttcctgaaagctctggacagcacagtacagaaagtgtgactccagagagtcactggctttagaagagggttgcgtgcaggacccttgctttgccagaggcttctccttgtgcacgttaaagtgaaacaggaaaacgtgacaaaatgtggggctggagaaatgactcagcagctaagagcactggctgttcttccagaggtcctgagttcaattcccagcaaccacatggtggctcacgaccatctgtaatgggacagctacagtgtattgatataaataaaataaataaatcttaaaaaaaaagtgacaaaatgtgtttgaaagcagtgcctgccttcttcagtctgaaatcttttatgtgtaatcactttccttcagtgaactgggagagcctgatcgccaccctggcatgttcctcttactcctggtgttggagagactgtacccatcgccgatggacggcacatcatctgcgctcagcttggccccttttgttcctttcattatcaggtagtgtcatattgcagggaacttgagagaatgttctatcttgttcttatttggagaattataatcaatatattgtcttagggagccattttgtgaaagcaagagagtgaagctttctgctattgctcctgactgttctccagtgctttctgagcagttacctgtgcttagcccctgggtgtgggcgcctatggctgtgttgatagtgttttccttggagaccggctagtgggtgtgtgatgttgatcggaagtatcccttttgaaaacactgcctatggtttgtattgaacagtattgggccagccaacacaggtatgctgggcgggcttgatcctagcatgtattccctgccctgtggtttaaaagaatattaaggcacctggctctttactctgtggaagtcagagcaaccaggacctggtgtgcctgtggcaatgccacttagcccattgtcccacttaatcttctgtttcaaacttggggtgcctaaaagagatgcaaaagcataatgcatgtgggtgcacaccaactacaggatacatcaccaaaggccccagtacctcttctgaaatggctgtcactttttagtttttgactgtgcaccttaacgtgtgatcctcaaaaagcatttgtgttttcctatgactcactttagaagctataatattattatcagctcttactcttcggagttcttgactagcatgtgcctttcatggatctattgaaatttgagatggacttggggaagcacaagaacacaaagcttgagtgtgtttattatttgtgcagcatcttgtgttctgcttcctgggctcacatagttgacttacgcatttccatgtgagaaaccatgaaacacgaggttctgacatgtgatgctgtggccatttgtttgccaccaagcctgggctgtggttgtgctatctgtgatcacagaggtgactcactgggactggcttggtttccgatacaaagttaccgtctgcctcctccagtattgggtgattcattttagaaatttggtggtaaattttactttcaagagccttaaaagtgttctctttcatgaacatttgtgtgtatttgaggggaggatgcagctaagcagtgtttcagaaagttgataaaagggaaaaggtacaaacagtatcagcgccattagaaatcaagatgtgctgtgcaccatcggctatgtcgagaccattcattctgcagaggcttttaccacaccatctgttgttggttgttcctagagacaggaagttgctacattgaaaatactcttccaaatggacctacttatatataatctgagtatgtgcatggtcctgagagatagtcaaagattacagtagtatagaagatttaaatactactctgaaaccaggttgtagagagcattgaagtccttagtaagtgtgtgttgttgacataggcatgaccatgtcagtgaagctggtgcctggccccatgggtgaaatttccctggataagattcagagaatggcagcaccttcctctcaaccatgtggggatggtgatggtgactgcaggaaatgttcacagctactccgcaccacccgcgttgggagcccaagttcatggcctaaagattgctcccctacaaagagactgctcctactaagattagctaatcctgtctcctttttcagttgtatatggtaaccctgcttccttcttcagctggctgtgtgcaacacccttacctccctgtccagttatatataaacatactgagcttccagtgcactgcagcttccccaatagagagtctagaccgcctgatcccatatattctgtgtgtctggtatgtcctttcctcattacctagttagggttccaggccccaagctgtgcaaggatgtataccaggaactgagaacatcatctgggttagtttggttggtttagtttgtgttgtctgtttcacagtgttggggatcaaacccagggccttgctcgtgcttggcaagctctagcattgagttgcatcctcagccctggtatgtaagagtctacccaggaggctgggaagatgctttagcagttcagaacacttgttcttgcagcagacaaaggctccgtttccgctattcagatgatggctcacaactgcctgtaatttcagttccagggaatccagcaacctcttctacgctccacagacaccaagtacggccatgatgcgcacatatatttgcaggcaaaatacacataaaatcaataaatctaagatttttaaggactttagcttatttctctgatactgttttgtttgtttgtttgtttttgtttttgccagcctgaatcttagaggtagctgatttggtttttctggtctgtatgggcagttctttgctatccagccccttcctccatgagtgcagtgccttcacatatagccactccctctgcgttgtgacagcatgaagcagaataatggggctttacaggagctccaagaactgcttgactacagtttaccagcgcctgtttgtcgtgctctctaaagggttaaaggaagggcctggagcctttcagttcctttcacaggcaaatttcaagcttccactgaaacattacaggaaagcgtatagtaccatcctagagcgccatgactctggagtcctggagagcaaaggcctggactgaggaggctcggcttcagagtgctctgccacttctaattgtgacccttgcatgctgcggtgttcccgctctggactaatgtgctctctgtgtgaaaagcacctgagaggtcagcagctcactcactgagggagacgtcgcctcactgcacttgactgtgcgaggcacttagaaatgtccttcctccccgcccctcggcatcccccttcttcctgcttggtttaattcattttcagtacccatcttccccagtccatttgttttcctttgtttaaagtgaaatctgcttgcttgcttttccctgacaagtactaagtacaaataacaaaacaagtacgttcctgtagaaaccatgtacctatggggtggacattttacattgaaacaaatctctagtgaacaatcaaagactaggaaagcttgtgttcatgtatttagaatgtttcgtggaaccttaggattttatcagtcatatcaaagaggaaggtgaagatagaacaacttagtcttgtgacaggaaataatatgactctggtcttgttttcctttaaacacataatgtagatgataacgttgcaccttctccaggttacgaagcaaagcagctgtgtgctgtgttggggtattgtggctcttacaggaaacagtaacgagctcctccttccgttgagattctgctaccaagaggtctcctttaagtctgtgtgttaaagtgctgttttgtttttgttgtgggtttgagatggagtcccttgcagcctacactttcctgggctcagcgagtggccagagatgaccttgtacttttgatcctcttgcccctacttcccaagcacccgcataataggcataataggccagcgtgccaagattatgaagggctgggaattgaactcaggacttccaactaacctatgtgccatgcagccatctatctaccctatttgtacctgctctgacttcccagaatccttttagataagcagagggcaacatttgctttaaagagacaaaaaaggcaagcagagtggctctggcaccaccaaggtgaaagtcctgcctggccctgttcttgtgctgtcggctcctgatgctcccctcttcaaacgtgcagagcaccccttccttgtcattcatctctactctactgtaccagtgctcagtgcttgctcttcagcataagctattctccttctatgccgatcaggcattgctgttttgtggtactttcccctacctaatacaaatttggatactgagttaaactgagtaatgtaaaaatgaaactagttggagtcaaaactttgtatgtgagctgatctgtttatctctgaagtattcaaggacttctgtagccacggtgatggtttatataggtaggggcttcaactgggttccatgttctacctggcctttgaggaagtctgtattaacatgagctctgccatttgcttatattgtgagtcacctctctgatgttcccccttcccattcaaacaagttttgatcaaattaaattcttggactgaatgttaccttggtcctctctggcctcatgagcttgggagcttcttggagtctgagctcctctctgactgtcctttagagaagctctgtgaaagtctgtcttacaggaagtgccctgaggcagggttagtgtcataggagagaagcagcagcaaagcactgtccttctgctgtaactcatccagttataatggagccagtcatggaagggaaagacacccagactaatacagcaagaatggaaaacccgggtaggagagcctcagtgtaatggggttaaatgtcctgcttacaaataccgctcctaggtttatgtgtaacagagcccaggaggttgacagtcttttataggaaaagaatagagaaggataattttaaggctgcaggtggtggtgcacatcatttaacaccttaaccctatcatttgggagacagagacaggagaatctctgcgagtttgaggctagcctggtctacatagagagctccaggacagccaggactgcatagagagactctgtctctctcatctctggtggtatataataactgcacatatttgattggcaggtaacagtgtcttttcaatgcccatgtgcagtgtgtcccacatgtcattgcatcctaagacatttgtcatttcttgggttgagaacatttagactctgaaacagcaggcattttttttagcacttgttttggtgagtctctgccaataaatgggaaggaaacccctgaagccagatgaaggtggggttctagggagagtgcactgtgttctgtgagagcatgtcctgagactcaatgactgacaaacatgggttcaaaagtcagcattttggggaccatgaggcatggaaatattgtgctgacaaccttcaaaaaactcttcaaagtggaaaagcagtgttttaaatgactgcatagttgtattgatatcagctatgtttgacttgctcatcaaagtatcactcctaagtgtgctgtgctttctctgctgagaactagaaaggcctccctaagatgagtgagtcctggctgagtcccttcagtgcttgatggcttctcggctgctgaagtgaactttagtcagcatctactcacttaaaggaaacagattcagttgcaacttataaagtgtgtgacatagagaaatgactaagttgcaaggttttcaggagtcagggaggcactgcaagttcaggccacacccattatctctatgcagcttggggaaaggaaggggaaaaggaactggaaagccacgaactcagaacttgaactttatttatgaagtatgctttcttttttaatgcttggttctcgacagatggttgaatgtcatattggtccctatacttttttattatgtctgatatagccctttattgaagatagagactagcaaattaactcaacaggtaaatgccctggacagcaagcctaacactgacctggtcttgatccctgggaccctcctgattaaaggggaaagctgacttgtacaagctgtcctctaacttccatgcaataagtatttttttgagttgtttgttttttgttttttgtttttttttttttgagacagggtttctctgtgtagccctggctgtcctggaactcaatctatagaccaggctggccttgaactcagaaatcgcctgcctctgcctcctgagtgctgggattaaaggagtgcgccaccactgcccagcaagtattttttttaatatagattctaaatagacttaggaaactgtattggtagcttgagactagagatatgtaccatgttctggtctttataattaagattatatctgattagaatgtagggtgtctgctttgtgtgagaaagttttgggaatggtattttctgtgagcacagggtgcagcgtgacacactgctgtcagagagcagagtttttccatggtcctcctgaactctgaggacaggacaggcccacattgtcctgtttgttattctgctctgggaccctcactttaggagggtcattggtaggctaatgtttatttgaggcagtgagcacagtgtggagcaagctagacatctggaagccgttaggctggggaagatggtaatggtctccacacactcagttaggctggggaagatggtaatggtctccacacactcagttaggctggggaagatggtaatggtctctacatactcagaggctgccatatggcagaaggcacacaatttgtcatttttcctcccagtgggaacgtaagagagattgtgactctgaagacaaaggagagttttgtgaaaggcagtgttctccatcaaaggcatgaatagatttcctcatagtgggctgcccagcaataaaagtgtttgaggaaaactgatcatacgtcggacacatttcccaaaggatctctgatgcatctgaggttgggcaggatgattgtcaaagtgtctgtttgggatgccttgtttcagaatgagtgctgagtcttcttgtaaatgtctcacacctgtgtacacattcttttcttttttttttttttttttttttttttttggtgtttttcgagacagggtttctctgtgtagcctttgtagaccaggctggcctcgaactcagaaatccacctgcctctgcctcccgagtgctgggattaaaggtgtgcgccaccacgcccggctttttttttttttttttttctgtgtacacattctttcatcttcctcgatcttactaaggagagcattggggagccatcttggcgtggcctacatggtgtggtggtctactcctaaatgatgccctccagaaattaatccatttaaatttagcttctgagtaacttctgtaactttgttctggatgtttctgaaaacactcttttggcctttgtgatgttatgtctgaaaagcattccttattgatttaattatctttttctgtggttgctgtatttcttccattccagatgttggcttaagttgcctttgttttctcacaagtataaggaacatctgagtcttgagaagtcagaggtggcctttttaaaatggctggaataaataactgtttgttgtcctagtttttaaagggtcatgttgaatagagatgcctgaggagaggattggagtccccaagtcctgacattgcacaggggaacacctaagaagtgcgcctgttggggctgcaaatgaaggattcccctttcctggccctcctttggttaccactgaatttcataggggcttggggacaacaactcctggcaccctaatctgctgacagttgggttatcaggagacctgttgccctgtctgtctagaactgtctccctttggtgtcactggtgtgactgactaactgtaaacgctggatcaggccttggacaaaatggcaaagtacaaaggttcacctctgctcaggggggtttcagcggctcattttcccttttgtctttaaggcaaactggtgtccactcctctctctatcagggcttactccctgcgctaattgtgatacagagatgtacatgtgaaataactccctgagactctagtggcagcagtttaggcctcagaaggaggccatggagcagagatgggaataggggttgttggtgctgggatatcctcctgcttggccacctcctccctgtggccccatctagctctattgagagctgttgtcatgctcttccgagtttgcagactccgtccagaggtaggtaaagtttaacatgtgggataaaatcatgttttctattttgcgtgcctcacctacccctaaagttctgggggggaggagagaatgacaagaaaggaaaatactcactgatttttctttctcaattcctagagcaagcctggccaactcagtcaggggtgccagagctctttaagacctttttttttccaagtatgtttttaagaaacaggaatgaggaattcacctctcatggaatgcattgacaaagcaaactagaaaaacaaaacttgtagagaccagcttttcttcagtgttatctgttacttcaacaggccagttcaggtcatgttagaacaagtgattagatctgcaaacagtctcattcttaggtgaaaattcagcgatgataatccatggcctgttggtgtcatttggttgaaaagcctgaatccaatcagttgattgatgagcagagtacttgctaaacatttattgtgtatcgagcttgtgttgagttgtgggtaagctggaaggggtcttcatccttgacgacttggctgtaaggtcagtgagatgaagtgcaggctgtgactctgccagcgtgtgtacgttacccacagtgttaacatggtacaagccctaagtactgaggccagtgaggtgcaggctttcccaagaagctggacaagtaaaatttcagggaaattcaatttgccatttggggcacttatagaaacaatccactgtggtctcatgcaagaatgaaatgaagccccgctctgcagacaaggcacccagatatagggcagggcttcaatagctctaactcataactcagaagtaactatggaacattgcttctgtttgaactaaaggtgacccaggaaatgcagagacaatggtttgcatttttaacgggagaaaccattgacaacaaatctttggaaactttagtaaagagtagtatttaccccagaggctatactttttaattcactaacattatacatttaaaaatacttttataattttttccatataaagcttttatttccctggtcctaagtattttctcaaaaaaatttgccatggtgctcatagatatttttaatgctaacatgaaaggctgcacagaccaaacccatgctggctaatgtgcactcatttctgtatgtagtagggaccatttttataccaaaactgtactttgtttttttttctacacagaagtatgagctagggaactgagcaacatgtaaaaattaaatacagcacagtagaatgatctggaaaaatgacaccatagtatgttttggttatctttttccgggcccctggnnnnnnnnnnnnnnnnnnnnnnnnnnnnnnnnnnnnnnnnnnnnnnnnnnnnnnnnnnnnnnnnnnnnnnnnnnnnnnnnnnnnnnnnnnnnnnnnnnnnnnnnnnnnnnnnnnnnnnnnnnnnnnnnnnnnnnnnnnnnnnnnnnnnnnnnnnnnnnnnnnnnnnnnnnnnnnnnnnnnnnnnnnnnnnnnnnnnnnnnnnnnnnnnnnnnnnnnnnnnnnnnnnnnnnnnnnnnnnnnnnnnnnnnnnnnnnnnnnnnnnnnnnnnnnnnnnnnnnnnnnnnnnnnnnnnnnnnnnnnnnnnnnnnnnnnnnnnnnnncccccccccccgccttgggccttgactcttcttaccgcagcacagtagtctcctgtcatccttagggatatattcctagatccccagtagttgcatggagccagccagtattgactcctgctctgtgtttggccccataaatgcatatgcaccaaaggtgtaacttagtgcttgatgcacaacctcaaagcccccgccaatcccctcccctggtgtcgctgcacgcctaggagacttgtagcttttcctcttttcctaccggatagctttcaccttttcacttcagagtgctgggttgggatagttccttggcagggctgagtttccagctttaccactgctttctgtgttttgagatgttattcaatacaatgtgacttgaacccacctgctctttctctgcaggagtcaataagccagacagccaagtggcttccaggtgggaagcctatgccctggggatgagctgagcaaatggacggtcatgttttcagctggatacttcagggcaatctgagatttaatcactgtactcaaaatcttatataaattcaagcttaaagattgcttattcctgaaatttcccaagtacttttaggcctcaggtaattgaaaccatggaaagtagatctcagggtcagtaggagtcagacagctgtgtctacggtctggctcacgcatgcattatgacttcatgtcgtgcatgaaggccactcactgcgacttccatgcttttgcttgctcttccccatcttctccattcacattggcatttctttttccctcacttgatttagtgagcatttgtcactcccacttcattgttctgctactgaacttcctgagagtctggtctgctcttgtttaactccttacctctacttgatcatcttgtgtttataagagccgttagaggccactggtgcctctccacagagacttctactctccctacccaaagctgtctcatgttctgtgaggattctgagaaaacttcatattcatagtcccatacttcatgccctgctctgatcactccttgagccattgcaggctagctccttcccaccactgcactgaaactatatctagtttccaacgcccctgaatgctttgcagtagtttctgattttatcccaaactgatgctcatgctcatgactccctcttccaccgcctttgccattgtttctctcccctcttcccattcctccccactctaccttcctactgctcttcactctctgcttccttgtcctggcctcagccttttccatttattcccctgcactccctgggcttgctacacacctaaggagtcagtcttgatctctgattccttccttccttccttccttccttccttccatccatccatccatccatccatcagagactttcttagagcactctctgcctctcccacagacaaccagaggtcaggtcttggagttgtctctgctcactgaacagccctcccttaggatcaacagcagtgtctactgttacactccaccttctccacagcaggacctgactgtgttcacatttgctctctaataggagcattgctctaaaataaatccctggtccccaaaaaccttgcagtaagtgtgaaattaagtgttctttttttattactgattaatactagtttgcagtagcaagtagcagcacttcatgacaggccctggagaaaataagtctgatacatctacagaccatttaagtcaggtacttgctcctttatttgctcactcaacagaaatgtgcagagaacactgaggcaccaaataggatggagaatttgaccgggcatttttcatctgaggaatcctggcctgtggtgtttctgcctctttttgttcagatttccccatcctaattagtgataaatggtacttagcagatgtctatggaacatttataagaccttctatatgttagcctatttaatcaagacaacagtgtgagtttgttgttgctattactgtcatctaaaaggggtggcatggaaatacgccctaggtcatattgctagtgtgagctagacttgggtttgagtccaggtgttggctccagagcacattggccttggtttcctagttcctcacccaacaacaggctctcccacctacctatttctgatgcgctatctgtggaacatgacaagcaagttcttcatgtgccaaaggtaacctctagttttatctaacaggtgtctggctcgccttgtttttttggatgtttctcctttggggcatgatattggcagtgcactcgtttttccaatctgaaatcagcacttaaggaagaaaaattgcagtaaaatccatctgcttgtgacaggttgctaaatagaattggctctgcagaagtcctgagattcttgagaaatactgagactttgttacaaaagaaattgtccttgttacaggagctcagggtcagcatacacttgcagtcatcttggtgaagagcacgtgtggcttgaggctgagatacctaaagtcctaatgagattatttgtgggctgctatttatgcatgctttcaaaaataaataagaagttttccttctgactctagtgtgtgttatcctgagtttccactgttaaaacttacataattttggactttgggttgctgagagtgaaggaaagccatttacctgcagattttcagtttccaaaggactcatccatgctcatctgttcatctctcctgccttacaacagagtcacgtggttgtcagtacacatcccagtgtttgtgttgcctcctatcttctcatctgacagttctaagcctactcaggaaaaggccagcatggataaataaggtgtttaaatgggtttcattgctgcaaggtacatctaggaaccttgtgtaatgatctcgaggggccctaacagtagcagctggttggtgtaaacaggttagaattcccctttcttgtcagttttatgtttctgtgtactgagtcccgtttctgtctttcactggctgaattcagttcagtctaaatatcacaaaaccatagtttggtgccccaggggtggggagtatcccatgttcatccccacagcattcacaacatcgggaagaggtgttgtgtctagaaggcagggaagcaagcctacgcaatcatgatcaccgcagctgtgctgggataggccatctgctctggtgcaaaccgtggacagatagccaaatagccaagaaagagctgagttgttactgaaagatgtgtcacacagacaaaataatttacaaatagtaggcaggaaatattttcaaaacactaagagagtcccttgagctgaccttgtgggtgttggcttgtttcttgctggactgttcattcattttttttccccctataagagtcattatttcctacaaaaccagaatttgaggtatagcttcagttgaatgtggacaaaaatgataaaaatgtaaaatctaatttaatactaattgtaattatataattctaactaagagaaacttttcaagaaatggaattcttggtgggtgtgatgatgcacacatttaaaccagtacttagaaaaaggcaggtagatctctgtcaggccagctaggctacatagtgagtttcagacaagcagggctacatagtgagacccgggggcggcaagaggatttgcattctgctgtctggttgagcttgtctctaaagtggaagctttagaataccgcagcttgatagaattctgcttataaaccagcccatagaccagcttcttcatgcctgccttttctaaagcattgatgacacaaggcactgggtgtgaacctacaggactccccaggatggcacaacagcctggcaaagggagctggtgttgttgggcaattgtgctctgatttggaagcaccaggctgtgcattctagaatgggtggctactctgactcaaccttagataaatattcctgaattctaagtaagagttcccacccacacacttacttagaattcctgaattctaagaaaaagttcttcactcagttccatggagtgaactgagtttggaaggcagtaagagaacacttggtactaggtactaggtactattcctgtaaccaccccatttcccttaggagtgactcttatctggagtgctactaagctgctgcagaccctagcaagaaccagctcactctgaggggagtggaaacatatgaggagttatagtcttaaacagtgcccactgtccatcgaatactcttagataccacctttatcttgagctgaggcttgaggggttttcagacagatcttcattcattaagtatgtagttatgatcccttctaaaacagtgagaggcagactacacttaagtcattaagtgtgagttactttacatctttggtcttaacaagaagacaattagaagacattggcagatgatgcagcatggggagaaaaaagcatgctatcattctcacactgtggtctggtagaggaccatgccttttccccaccacaattgctcccatgctttgagtaacgtctatttttcatttacctctctcctgtcagagaaatcattcgaggcctttttacagctttgactcttccttaccattcagagaagtcgttctatttcctttgcaagatgaaagcttgtctttgtcctccccaaatagttccaggctgcagaacacccagaatccttgcagataaaagaccttgctgataaaatgctagattgttatcagagatgcaagtgagggagtcaagtccctgccattacttacctccttacagctttgtttatatcctgttcatttggggcatgtttttcttggacagtttcttgtctgtgctctgaactgcagtctgaagtctgtaaacctcccaaaggtcagggagtagtgggttccttcttttcagacaggtttaatggcgaggaagagaagatcaaagtttctatcttccatctggaaagaaagggaccaatgcttggtttgaatggttagttcctcacctcaggtggcaaacgtgtgcgctttggttcagaacacttagccaggaagttgcctggaaatagactggcatttatgtctgaagccaagcagtgatagatagattgggtattcaggcactgaggccaggggccagttaaatcaaaataaaactacctgggaagtcttgacagcatgatctgcacatttaaaaatggctgggctaggcgtggggacatcacagcactcgagagtcaaaggcagatggaactttgagtttgaggccagcctggtctacctactaagttccagagtctcagtggttgcagtcattttcacttagtatttccaccgagtgtgtagtggtagataattcctataaatatattaataactgacaccaccttcactgatggctaacatatatgacattgggttatacaaacatatatgcacacatataatgtcctttgagtttcccaagtaactcagtgtgttagcatcttcacatgtgttcacttactctttctgaagtgtctgttcagagctttgactccatttttattgagttgtttgtttgcttctaaatatattctggattctagggtttttgacatagattaatttatttccctgcatttagaaccagaaaaacaaaattaaattgcagcaagaaagagtctaattataccaaaggaagtacttttcaactgttgtaatactatagtctaagtatgggttcagggacaaacaaaagccatgtaaagcttttcctggggcacttatagcggaagggctggtagtctcttagcagtagtactgcaggtctgttgggacgtgacgcaggttaatcttcctggagacgagtttattgctaacatgtcaatacccttcctgtgtggtaccatttttctaggccaaaatagtgaaactttttggaaggcatttccatgtgcattttgttatttaaagattcattcttcctgattttagttgagtcgttgctaggagataaaaggaaggttacttaggggcgttaatcagcctagcagagcaaactgcaatctctgtagggcaatggccactaaagccatgctccactttctctctttcagcagcaacacttagtattgtgaggcagagtcacttagctctctgtaaggcaaaatcattaaccagactttagagaatccagatgatttagaggtcatggggttgttgtggccttagaaggagcgaggggggctttaatgacagggttccaatagagttaatgaagggcttttctgtgtagaaaacactggtcaattgttttcaagtctgacagaggtccaagcccaggagaactgctctgacttcggttagttctaggcataaaggtttatcatcagcatcaatattgttacgagatcaagctataaaataagtcacgagtgttggaatctttcagaaacataacagattctttgtttgtttgtttggttgtttgttttgttttgttttgtttttgtttttcgagacagggtttctctgtgtagccctggctgtcctggaactcactttgtagaccaggctggcctcgaactcagaaatccacctgccactgcctcccaagtgctgggatcaaaggcgtgcgctgccacgcctggctcaacataaaagattcttgtcataaggggaactaatcaaactgtttacatttaaaagtatttaagctgttatgtggcgtgctcaatgcacaggttatgttaattttattactttggtgcaaaaggaattttagtttcagactaagttttaagtcataattaggctagttaatcaaaataggaactattaccatcaacacaattttgccagtaagtttgtttatccagttgcttaaacattttgacttcaggatttgatgaactcttagagagcactttctgcatcctgctggctgtggaagtacaaaaagatcctggaagaagtagtagttggttggcaagaagtcaggagattaattgcacatgaggcaaaacttttttgccagttttgccaatttatttgactttgaagcactggttgtgtgatacatggtcagggttgttggagaattgggcccttagttgcagtttgcagtacatctcctctccttgctgacgtacttctcagatgtaaggaagggtttcactggaattcagaatgctgtggctggttagcctggcaactgactaccctcagtgatcataactgtttctgtacatgctctgcttgggctctgctttggagcagctttgtgatgcaagcacagagctggagtaccgtatacagtgacactagctaccttatacaatctccttttcatcacagatacactgttttgcacagaataacaaccttatggaggcaaggggcattcacttactgagagctcacctttctaatgtgcatcaaatatcagacaaacgttggatggccatgttgagttctttggcaacttgtcctgtggttgtggctcagtgttggtcatcttaactgtggaaggcgagctgtgcttgttcctcccgtctaaggttatccattcctttgcaagacttagagttgtctgtcactcaccatgtgctcactagcaggctctgactagttcacgcttgacattgagagttttctctactgcttcaccactcacttgtaattctaataagaaaatcactcaaatctgctcttcgtctaacatcaaaagtataaaataaatataaaacaaatataaattaataaggtattagtttttaaaagcaagaaatatgtattaaaatattgtaaaacttatccgcagttattaaaaatgtattgtgcaggggtttgatctctgcattcatgtatacaggcatacataatttagaaaaagaataaaaaataattctttaaaagaatgcatttctctatcacacagcaaattttaatactataaaaccaaaatcacttttgtacttaacctaatcatatcctttaaaataattataatagggctggtgagatggctcagcaggtaagagcaccggactgctcttccgaaggtcccagagttcaaatcccagcaaccacatggtggctcacaaccatccgtaagggagatctgactccctcttctggagtgtctgaagacagctacagtgtacttacatataatcaataaataaatctttaaaaaaaaaatttaaaataattataataggnnnnnnnnnnnnnnnnnnnnnnnnnnnnnnnnnnnnnnnnnnnnnnnnnnnnnnnnnnnnnnnnnnnnnnnnnnnnnnnnnnnnnnnnnnnnnnnnnnnnnnnnnnnnnnnnnnnnnnnnnnnnnnnnnnnnnnnnnnnnnnnnnnnnnnnnnnnnnnnnnnnnnnnnnnnnnnnnnnnnnnnnnnnnnnnnnnnnnnnnnnnnnnnnnnnnnnnnnnnnnnnnnnnnnnnnnnnnnnnnnnnnnnnnnnnnnnnnnnnnnnnnnnnnnnnnnnnnnnnnnnnnnnnnnnnnnnnnnnnnnnnnnnnnnnnnnnnnnnnnnnnnnnnnnnnnnnnnnnnnnnnnnnnnnnnnnnnnnnnnnnnnnnnnnnntttgcggggagggaggattgcatttgtttttattgagtttggtccaatattcttttcttttctttctttgtcttcctccctccctccctccctccctccctccctccctctttcttttcttttcttttcttttcttttcttttcttttcttttcttttcttttcttttctttctcatctttttttacagtctagccattatctccatcccggcccagcctctggctgttccttgagccatagtcctctaagacctagaaagtcattcattgtgagcacagaccattctcccaggttgatgatgcgaggtacaagtgttctaagtcactttgagaattagaactcctggcagtataacaccagcagaaggccagcctgtttagctggcttccacgcctgtccactaccttcgagaaagggagacaccctgagagctggtgctatgtgcagaaccacagtagaatctgcaggcgccttttttagtccctgtagatagagcagggcagttaggaagagctttgcctccgagagggctgtgcagcttatcgtcgtcgtctcaggctgcagaatctgcaccctcggctcttctacaacgctcattccagcctgtgagcccccaaggtagatctggcaatgcttttccagttgttgtaggggagatgccagcaagctggagcccactgaatggcagggtgatagtctgtgttacatctttagatatttagagcacttcatttttcttttgggtaagactgaaaatatttttcctaaatctctaggtctaagggggtccaatatctttgtgtggacatccttccaaagcgttcttcttgacctgggaaagagttcttactaagggaaactgtgtgtcacaactacagagaaaatcttcttcccagctgtctaaaacactactggaatctcagaactttagtttcaaatgttattcattatgggaaaaaaaacaaacaagtggtgaatgattgagatgaaatatcaggtgaactatgaaaattatattttgtctctgtctctgtaagggcagggaatcaggcattagcatttaaaagccatgcatctcttcattattgaagaagtaattctgagtaatgaacgtgcactgtggacataaatactgcacattccctttccatccttctctgggggacttgtacatgccattgcccagcactgtacatgccattgcccagcactgtacatgccattgcccagcactgtacatgccattgcccagcactgtacatgccattgcccagcactgtacatgccattgcccagcactgtacatgccattgcccagcactgtacatgccattgcccagcactgtacatgccattgcccagcactgtacatgccattgcccagcactgtacatgccattgcccagcactgtacatgccattgcccagcactgtacatgccattgcccagcactgtacatgccattgcccagcactgaaaggaatggtgtgcatgcaagcagccatcagccgcggctacctctgcatgcatgtgtctgccacatgcggtggctgggtgctgctgaaggggtgtgcagctgccattttagtttaaaaattagcatctgggtaaggcctagcaaccacgcagcagagtgcgggtgactgcagaatcatgcatctcctaaggcccagccccaagggatcacatcgtccttctctcatgttctgttgtggcttaatagtgtcagcatttcttcatgtggttttgttatgtcagtcacagttaacttacatacaatcaccgatttacctgcagatacatgatatttttgttttgttttgctcatcagacctgacaatgtgcagtttttagcttagcaagtatctacagttcttattcctcactcattaatccgaaggaaggatttttttttttcagtttagctccaaaactccaaaagtcctgattcatttatatttggtatatttgaatggagaaacccgtgacgaactgagtagaggatgtaagtgcagttgttaagtcctagctaccaatgcaagtgggcaggaaaaggccagtgcagttggcaggagatcatttgatgaattagaagcaggtttaggggtctaaagagaacctgttagcctggaccatcactgaatgctttgagaatgtgaagatgacattcacaaatgtatatagattttttttaatttattggatgcaaactttcttttaattatttcttctatacatgcacacatttttctaaaggcaagatttgggacagcattcaatggaaaacatctttgctgtaatagcagtggagtgaaccgtgcatgataaatttgagccctaggcctggagaataaaggtgtgagagcagtcagttggcccagagagactgaagcatcttctctgctgtgcagcttatttggatggagagtgagggtggggctctgtgagcacgtgcaggatgtttggtacaggatggagagtgagggtggggctctgtgagcacgtgcaggatgtttggtacaggcaaggctctgtttcctgttttgacacagagaacactggagacaaacagagaatatacttgctcacagaagctttaagttctcagatgaccctacctgtcagattataataaccggttgccgctcatctggtgggcactgtgttttccgttcgttaccttatttgagctcacagtagccttaaaaggtaagcaaatcttagaaaatctgttgactttccctaagaccctcactagtgagagtacttgaatctacaccaaggcatgctagattccagaacatgctctcaagtctctgttctcagtgtcattcagtattgtagacaaggtagtggccaggggttgccgtgggaagaaagggtaaatgagatgcatcctgcgagcttacacagacagggctgtgcgcttgtaataactgcgaagggatgaaagcaatggctctgaccagaggtagtgcagcaaggttgacaaaagagcacacgccctgttagaattcagatggagagaaataagttatccaatggccccagggtcaaagcacattccaaaggcattccaaatgaagcagcaatgaagagttgtttaatagtgtaacttggaaactattgctcctcccctaggcttcagagggaccctggaaggtagggttgtctcagtcattagtgggcaccattttccaagagcagatagctgagctgtatggaaagcagaccacagttgctggtatttatgagcaagtttagtgaggggaagtcttgggacatagctgaatcacaaagtttattagtgttcaaagtgggatgagaaaccacttctgtggttttctattttaatagtccttggattctattgtttgtttgtttgtttgtttgtttgtttgtttgtttttcaagacagggtttctttgtgtagctttagctgtcctggaactcacgctgtaggccaggctggcctcgaactcacagagatctgcctgcctctgcctcccaaatgctgggattaaaggcgtgcaccaccaccatctagcctaaattttctaacatattcctgtccttgtccccaacaactgtcaaaacaaacctgcaagtgtatttttgcttagtgtttatatgtgtgtatacacatgtacatatatctgtttttaactgtaatctaacttcctgcttatgtaatttatactagaagattgtaaaattacttttgacttgcttcatgatgaatgctattaattaaattttactttataaatttccatctttagcaaatgcattgctttaaaatttttttttaaattgcatctatttattttgtgagtatatatgggtttgggtacatacatgccatagcacatgtgtgaaagtcagttctctctttgcaccaggctggtctgagggaacaagccttagaacttgctctgtagagcaggctagctctacataatgatctcttcctcttaggttgttgggattaaaaccgtggactagcatgacgagtaaacatgcattactgttttaggataattttagttctgtttattaacacaatggtatgaaaggttatgagtttagtaagtacctaaggcaggaaaaaaaaaagtggaagttctgacattgtcctactttcccctgtataaatgccattttggaaaaggtcgagagtagagggagggccattctttagtgtaaggctgctgctaattggaaactaaatatctataatcatttcattgtaattgaaagggaacatttatatataagatcccttttggtaacataaaaccctataacacagggtgtgagttggggctggggacagactaggaagcttcaaaataatagctgtgcaatgtgaaatcatttgctaattgcaaagcattttcaaaatattttctttgttgaatgaacttctgtccctataggccaagacagatattctactgtgtttaccaattacaggttaaatatttaattgttttaaaggaaataagtaagaaactgggtgagttgtcagagccaagttaaaagctgggaaggaactcacaggtaccaactgaagccttggctgcccttcccgtgtgtcccgtctgtgtcgtgtgctgataggctgactgtggtttccactcaatgtctactctttctctcctctgttgccctgtgtcccaatccgccattctgttcatacagaaatgattttgtgtgtgtgtgtgtgtgtgtgtgtgtgtgtgtgtgtgtgagagagagagagagagagagagagagacagagacagagacagagacagagagcgagcgagcgagccgtggtgagtgtgaaagttaagatgacagctttgtggagtttgtgagtttatgagttccaggttactaagcatatgtgaaggtgtcttaactgagccatctctctggctccagaaattacatctggttttattcttctaataaggcacatcctgaaatattataaacatttcttcccatgactacccctctgtctctttcacctccatggccatggccccaacagaccatatacaaattcttcttagcgcactgtttgctgttgaggaaagttaagaggccatctctttgtcaggtagaactcctatcttctgtgcttgccttggcatctaagacagctctgcaatcgagttgcttttctaagtggatgaagtagcatggagtctagagatgtctagtaaagaacttactaagctcagaccttgccagattggtcttcttataatctgtgttgtcttcaaaacctctctcagctttacagtctcactcagcaaaatggtgtggcctctcaggagctaagtgtttacaatgttaggaagccctcagctgcctgccttccctgtgctctgcaaagcatcacaaaatgccacttgtctctggctgtcccttgcttacttcccactctttgcctgagccagcccagtggtgaggatatggagccttggggttcatgtcttgccctcttagaagtaatgttgcctgccatttgtcatgctcctcagtgtggcctcccatcatcctgtcagttctttagccttaatgtcagtacctgagtcatccagaaacatctgcgtgtctcctgagccttcctgcccttgctttatgttctactattgttcttggctctggcaccaactagaaccatgctttcctgcctctctgtctttctcttctccctcttgtagccacaacactaaaatcacttggttaccgttctctctgcacttgagccttggttttgcttcttgtttcaaatgtgcatctcatctttccagacagcatacaggctgcccagagatagtcttgctgttgacgaccacgtaacacagcactttctgcttttcataggcgtccgggtaatatttgttcatcattgagaatcaagtcagttttgctatcacctgttatcttttttccctgtgatagaattatatatgctagtgttatttttagcaaaagcaatgtaaactatgaaacttatacaaatacaaagaaaagcatcatttgaataaagaaaatatatgaacaatcattccaaatgaggtattggtcctgtaaataaacatatgcaagatacagatgttctagcaagcattgaatcatattatgttttattcctacccaggtgtggtcgctcacctatttaccgctcccgggaaatggcagctcgtgcgttggtccccttcattatgatagaccaaataccgagtaccctctgtgctctactgaactcactccccaacagcactgaccagtgtttccgacaaaaccacattcatgggacacttctgcaagtaagtacaacagctctgtgtgacttccatagagcaccacaagatgaacttctgattcttgtgtgttcttagcacgtgaacacttgatacataggcttttaagtttatctgtataacttatttatttctacttcttaacagctatatacctctcaaatattacttcttgcacctcaagtatgaacatacactgatttggcagattatcctgtgcactaaactctgcaacatgctttttcatcaagtattcctatagaacattctggtcattccgtacccaacgttgtgacagtttgaatgagaaatgttacccagagtctcaggtattcaaatgcctgctcctcagttggtggcactgtttgggaaggttgactcacaccatttccagtttaccctctttgcttcccacttgtggttcaagatataaatcgtcaacgtctgttcctgccttctgatgccttcattttgccatcaaggactcttaactctcctgaaccatcagctcacataaactcttctagtcattgccttggtcatagtattttatcaaagcaatagaaaaccaagccttcaggctggcttttgttttaactaaatacgggattttattgttctttttacttaagaataagaatgagaactaattggaactgtcctattaaaaaagacccagtaacctggtaatgggtagtgttggtaagatccgctgatcacatggctgtggggatattcaccttggatggatgggaacggatttagattccatatcatgctgcttgattagaagcagaatgagagttggccctgagctcccaggacatactgtaaacctgaagtctacactactgccatgggggactgtgtgaaatggttcacagtgtgcaattccagagatggactgcctggttctgtatcagatatgcaccctgacccatgatataaacaaacatatgcccgaaggtgaaacgtaaggtagatctgtggtttcgtcttcatggcttggttgtttatatattcagtaaagatttattgaatacctactatatgctattgtgtcatcgtcagaacagtaagtctgacaacatcaagaccagaaagtagacagtcccaatggagcgtgctaggtgacggatgacacatggcagggccatcagtttaaagtggagaaatcagggccagcaccacagggcaggtagcagttaacagaggctgacagtagttaatcaggcatggggaaggagtttcttaggcagagaacatggtagtataaggtggaggggaaggtgccagcctgggaacaggaagttgtgggtcagaccaaagtgccacctcagtggttctcagcactttacccacttgaaattaatgagggtaccgagcaggctttacctttcagtatttacttagacagtagaaatgagagaatatcaagacataagaacccaaagccatactcctttatcaccggggaagacattctcacaatccttaaacgcaataagcttaactgcacatgatgaaggaaaagtaaaggaagccaccatcttagcatcattttaaagtagcttgatcccatggggctcctaaaaagacacacacccacccgccgccggctctcagttcagaactgagtgggcctcagatcctttgtgctttacagctttctgtaattgcttttgttgggaggcgagaagtgttggagttcagagatgtactcccaggcacctaggtggccgtcagagggcagccccagaggtcagtcctcaccttcttccttgtttgagaggctctctgctctgtacaccagggtgctggcctgcaagctttcaggggttcttcccttcgggttgtacctccggatttttacctttggactgggtattcattttaggtcctcatcttgtatggcaagtattttacccacagtaccatatctcccatctcatgtggttcttattataaagccttaagcatttagagcctttgggtcctctcttcattcctatgttaaagagaagaagcacaggttatcctagccttggaaacaggccataaaggcccaaagatcatcattggtttaaataaaacaagttaggtttctttctgtcggtctatctgcctttctttcttgctttctttttttcattttgtttcttttctttctttttctttttcttccttccttccttccttgctttcttgctttcttttttgtaacaaaaaacaatctcatagcatttattgtctcctgataataacacaaggacttctaaaaaatattaataaatctttcagactgtgctagcagaaaacacctttaaaaccactgtactgctttctcaatttctcccatgcttgaccatttctagttggaaacactttcttctatatcatttagtacaaggttcatgtactcgtcaaagccagtagcacaaccctctgtcagcacactgacttgcgcacagagccacacctgaatcaaagacctattttgcaactttctgaagatcaggttgatggggccgtactgccaccttctgtacctcatggccctggtcaagatacactggtgggagtcacagggaccaccacaagagtagaaaggttgcctcagaaatcccaagtcagagctgttggcccccaactctgctgctgtttcaaaggaaacagactagtgacaaggaaaagagcaaaactgagtcttgaaaatgtacactgtgggagttagagtgcccacaacatgaaaggttacagccatgctgctggctgggttctttcagcagtgtaggtaagtggggccattccttcctttctccgcttgtgctggtgggccgcttaggtgcctcctccatggcgggccctggctgttgcaccaaagtgcaagaaaggcttactgggggagggagtcacagtgtgggggctgggtgttcactgtgtggttggacagaccttgtagttcctaaggctacttcacctggtgggaaaggagtcaaaggtgctcgggtccttgggtctgcagtgctgtcagtgagcatctaaagggtggagacaggcagggaggagtcttccttggtagattctttacagagagctgcctttgaagccagcaaatacttgcctttggaaaagagatgctaagagcctgaaaggagtgatactctccacgggaccttcagagccagctaagtaaacacaaaactcttcggttttcgagagcaggaaatcattttgtaatcagaaaacaaattctttcagagaatattttcttgaattatacattgacttctttgaagatgtttacataaacatatcacaccccagagtgtttcttcagtataccttaaagacaaaaatgtgctgacccttgagtttctggctctgggaaagattcaaattatagggtgtgcataactgggacttgtgagttcctttcctgatcatccagagccagaggctcagcgtgacagtgctgaggtgggtggaagtgatgcatgctgggaaggtgagatatagttcagcaggttctgaagagcccaaggtaaccacaggaagtctcagtggaggcagcagagccatggagcttacagtgatcactcagagcaacactggcaggtccacccctctgtgaagtagagtgaactgttttactgccacagctcttcatgttaggaacttaatgttattactaggtcacttgcccctcctaagagctggcagtgccattcagaaagttctcttgttgagaccaagtttggccaacaactccaaggaaagctttgttctgattcttacgtatttaactaacattttgatatttcataaagaagtgtacagcatctgaggggagagtttgaattttgggtttgttcatccaccacgtcttttactcaagtttctgatggtataatatcaaatataaaaggtaaaagaaagcttgttcataaagctcgcagttagatggagcttgttgggcgtgagaaaaccatttgtgtatttatttgaatggtctagacaagttttgtcttcaatctaaacaatcactctggtgccaccgcacctcggtgtgagagacaagcaagctgcgcttccctagtaattgacatcaactttgcttttctgttcagttctttttttctccccgatttggagacttgatttctccatcttgagaattctgagttctaagagaaagggaaagagagagagatgtctttcctatccatggagctcagaggcggggctgcctgcttgtacagtacagtgtattaaccatacatagatgactttggatggcctaggacgtcagcctagtttaccatggaagtaaaggtaacctttgattttattcatgctcaagcattcaagcctgcaaagtagcaagactagagcccttcagtcatccactcccttcccagtcannnnnnnnnnnnnnnnnnnnagacaagcaagctgcgcttccctagtaattgacatcaactttgcttttctgttcagttctttttttctccccgatttggagacttgatttctccatcttgagaattctgagttctaagagaaagggaaagagagagagatgtctttcctatccatggagctcagaggcggggctgcctgcttgtacagtacagtgtattaaccatacatagatgactttggatggcctaggacgtcagcctagtttaccatggaagtaaaggtaacctttgattttattcatgctcaagcattcaagcctgcaaagtagcaagactagagcccttcagtcatccactcccttcccagtcaaagggagaggtgtacttcactctaaagcccatggctctttttataatgtgcttcctccctgcagttgacaagagtaacagctttcatgactagggtagttaagccaagagtccatctcttttcttatgttacctgttactggttgattggtctccttacattgagcgtgttgtaattggtcaacattggaacagagtccgccagcgttagagattgtgtggatcgttactaaaggtcagggactaacatggaaaagactcatcggaccttccctgcctccactcctctctctcccccttctctttgtttttctgcataagtctccttgctggaacaccagggttttctccaactgctcagtcacagtgctcacaccctctcttcctgagccttggacttgagcagttctggatctaggaagtggtgaggctgcaaggacatggtgacgactgagtttaactcagcaaacacagtgtgcctgccctgctctagaggtgctggaagtcaggggagtagtttgccccgtggggttttttctcccaatgttgaggggctggggtttgaggtccaaagcacactaagctctctgtgggcaggggcagcggggtgagtaaagctggggtgaaaaacagacagccagatgactgtggacttgaaagaagaaaaaaatgaggtggtctctgcttgagtcaggatctcgcaaagatgggagcagcggagtgggactgggtcatcaagaacagcttgagaactgaaggcacagggtgatcgcgaatggctctctagaaaaggaaagcagaaacctagggagcagtaaaggtgaaccagtttgcctaagtgtgtaacgcagctgctggtcaggggctgggaccagacaccatccttcattgctttccctagaccccggcaatagaaggaaggaaaaagtccaggagacagacagctttgcccgagtacttacaattaaatataatttaagagttatttccatcttttaaaagcatgcgcattgtagtcattctttgctttaagaattttaatatattttcttatttccatatttctcaacagtacaaaattgtgaaatataaaatgttcaagttgtccagaaatggcacagtacttgacaggtcctgtttgatgatctgtgttcgttgttgatgattttatgctcagaaagtacaatttcagacggaaaaacaaaagcctgaagtgatggtgacttcaaagctgagtggattacttgtctgtgtggtttgtttccagaccgactcagacattactggaaacactcttatttgtgactggtagtcaggtttgctcttccctcttgtggacctgtggtccctggaaaggagaatctgcatctgacaaagttgctccccagtctgggaagggctgtggccaagtttctcccatggtgtgattgtaatgtgtcaacatctctgcagagcctgcagttctcagacagcaggagtatggcagggagagctggagactgcgggcaggcaccaagctgggaggagaggcatctctgttaacgcaggggcagcagagcagtgacttactattgccttgatatgaacagcactgggggggggggggggcactgggctcttcttaaaagttaaagaaagacctagaccttgttaaaatgtacgttggcaatatatattcacttttaattaaaatcctacttccagggataaattaatcctttccttataaacattcaaaagcttttgtttggtgtgtgttacttagagaacctctccaagtgttggctccagagcacaggctgccatacatgattactgttgcccagcatgccctcccatggctttgcagtgttctgaaagaaggctggctaagtcagggctatgttgaacttacagaagagtcacttcatgtttctccaggggtgagaatggggccaggaatggtgaaaagtaaggagtaggcctctattccccctggctgctgagtaggatacagctattgaatgacctaccaattattgtgtaactacagaggtccttctggaaggttatgttattcctggcctactgataagaagaaaaaaaatgagactgagagagtttgagatattcctaaagttatacaaattataaatggtggcaaatagatcagggttttacttctaggctcatgtgaagcttttgagctgtgctcttaacttacagtctgagactgtatgtactatgctgtatacactgtactccagtgtgtgagtgtgtgtgtgtgtgtgtgtgtgtgtgtgtgtgtttgccactgttatactgtactatagaatactacttctgtgaatgaggaaaagaaagttctcagaaaaaccagtcactgtggggacttcagggtcccactagggaaactggcattgttgggttattcaagcactattgattagtgccagctttgtgttaagttgacacatcaaagaaaagagagatccttgctcaggagcattaactctcggggatgggggtgtagctgagttggcagagtgctttcctagcatgctcagagcactgaatatctcagcacatggaagctagagacaggaggataagttcagggtcatcttagctacatagtgagttcaaagctaacgtgggctacatgtgaccctgtctcaaaatccaacaaaaacaaaaagatcagctttcatggagctaatattcttatagcagggcagtagtgggggaagtaaaataatagataatagcatactactataacttacagtccataatgtaggtgaattatgtatgttcttggaagctactaattgctttggccctaaagatcagacagaatagaggagtcagagtaatgggagcaaatagtgaagggtcagaatagtcactgttggagggatagtgtttgaaactggagggggtctagaaagtgaatatgttttcttctcaaattgcacgggtcacataggtttgtaagcaggtatgccagatatgtgtcagaaactatcttttccatagacaaggaccaacaaagtggacttaatggatgaacaagactagaaaggacgccctattttagaagcacctaaaatgaattccctctgggatcagagtcaggcttgtctcggatccggaaaagaacagtgactgttgtaccacttcctctgtcctcctgcgaggcctttcacgtgctgcctgtacctgggcttgtgaggtagatggagagtgaagtggggaatagctctgcttttacttagtgaatttttattgagtagtttttaagtataaaccgttgtgctaggtaccatggaaaatacaaagaaaagtttatttataacatggcccccaccctcaagaagctgtgatcttccctgaaaaagaagctgtcaactttgcaagctacacagcagaagttatgtggcagcatatgatatgtgccaaaggaatgccatagtcaccatctgaggtgaggcgggatgggttggagtgagggcgaagacgtcagaaactttggggcttagggtaaaccagcgtaagacaccatttgcatggggaccatgtgcttggcctcgaggagatgaagataggagggaaggtatttgtcagcatgtgaaacactaaaaatgatacaagcctttgagcttaaaaaaaaaaaaaaaaaaaaaaagctgttttaagccaggtgtggtggtgcacgcctttaatcccagcacttgggaggcagaggcaggcgatttctgagttcgaggccagcctggtctacagagtgagttccaggacagccagggctacacagagaaaccctgtctcgaaaaaccaaagagagagagagagagagagagagagagagagcgagagagcgctgttttaggaaaattaatgtacattgaaacaacagtagatcatgtgatgcttcctactagcctgctgagagtgcacctgagagtgtgtcagttctgagagtgcacctgagagtgagtcagttgtgagagtgcacctgagagtgtgtcagttctgagagtgcacctgagagtgtgtcagttgtgagagtgcacctgagagtgtgtcagttctgagagtgcacctgagagtgtgtcagttgtgagagtgcacctgagagtgagtcagttgtgagagtgcacctgagagtgtgtcagttctgagagtgcacctgagagtgtgtcagttgtgagagtgcacctgagagtgtgtcagttctgagagtgcacctgagagtgtgtcagttctgagagtgcacctgagagtgtgtcagttctgagagtgcacctgagagtgtgtcagttctgagagtgcacctgagagtgtgtcagttctgagagtgcacctgagagtgtgtcagttgtgagagtgcacctgagagtgagtcagttgtgagagtgcacctgagagtgtgtcagttgtgagagtgcacctgagagtgtgtcagttctgagagtgcacctgagagtgagtcagttgtgagagtgcacctgagagtgtgtcagttctgagagtgcacctgagagtgtgtcagttgtgagagtgcacctgagagtgagtcagttgtgagagtgcatctgagagtgtgtcagttgtgagagtgcacctgagagtgagtcagttgtgagagtgcacctgagagtgtgtcagttgtgagagtgcacctgagagtgagtcagttctgagagtgcacctgagagtgagtcagttctgagagtgcacctgagagtgtgtcagttctgagagtgcacctgagagtgagtcagttgtgagagtgcacctgagagtgagtcagttgtgagagtgcacctgagagtgtgtcagttgtgagagtgcacctgagagtgagtcagttgtgagttgctgctacacagagtgcacctgagagtgtgtcagtggtgagagtgcacctgagagagtgtcagttgtgagttggtgctacacagagggtcctttagtcagccccgccctcacaggagccagggtccctcccgaaggttccccaggagagatcctgcctatcagctccctatcctgcgcacctggtttgtttggaattacatcctttccctcagactccatcagaaactcaatgaatctagaagagaacactgttacactgtctcacacaaagaactctttgaccattccaaggggagagtttgaagttcataaagtgaaaggagacacaggatccacccagatagaataatctcttacttttgcaaggtcatttttcatctccatcttgccagctcctcccagtccttccattgttattgttttgagacatttcattactcaagataattctgagtatacttcagaaatctatcagaacaaaggagcacactgtctacagtctggagctgtcgtttcctagtattcttatcaagtagctcgtaatatatgggcccattatttgatggacatttgggggtgtttcctatccaataaaaatattatttattgcct

SEQ ID NO: 237 - DNA, 2506 bp, Mus musculus
gtgcggatagatacactaggcttgctttgtgaaagtaatcggagtacagaagtggtctctacagaagaaatgcagtgggttcagttttttatcacttacaacctcaacagccagtctccaggggtgcgccagcagatttgctcactccttaaaaagttgttttgcaggatacaagaaagttcacaggtactttataaattggaacagagaaaatctacacctgactcagagaacgggtccatcagagagcagccttctgtcactttacagcagtataagaatttcatgtcgtctgtttgcaacattctctttgaagcattgtttcctgggtcttcctactcgactagattttcagctttaactatcttaggatcagtagctgaagtgtttcctgatccagaaggtaacatccaaacagtgtatcagctgagtcatgatattgatgctggccgttaccaaatacttatggagtgtttcactagtacttttgaagaagtgaaaaccttagcatttgatcttctgatgaagctgtcgtcagtaacagctggacagttccaggattctgagaagctgcaagacctgttccaggcagcgctggaactcagcactagcaccaagccttatgattgtgtgacagcctcctacctgctgaacttgctgatacggcaggatgctctgccagccgtcctgtctgcctcttccccacagcagctcacacgtggagcaggagagacgtctgctgtgctggaaaggaacacattagtggttattaaatgcttgatggaaaaccttgaggatgaaatatctcaagctgagaactctctgcttcaggctgcgtcttcatttccaatgtatgggagagtccactgtataacaagagcttttcagaggttgcctctaaatgacctgcggctggcgagcgagtggaggccactgctggggaggcttctgctgctgtcctacaggctttccactgtggtggcccctgtcatccagagctcctctcctgaaggcctcatccctgtggacactgactcagcgtcagcaagccgcttgcagctcattctcaatgagatccagccacgggatactaacgattacttcaaccacaccaaaatactgaaagaatgtgatagctttgatttggaggacttgagtaccagtgtctcaaatattgatagttctgcagaagttaaaggtaaagaagaaaaagcgtgtgacgtaactgctcagatggtcctcgcgtgctgctggaggagcatgaaggaagtggctttgcttctcggcacgctctgccagcttctccctgtgcagcctgggccagaatcttctaatgtgttcctaacagtgcagcaggttaaagaaataggagattactttaaacaacaccttttgcagtccagacacagaggagcatttgaactggcttatactggttttgtgaaactcactgaaatattgaacaggtgctctaatgtgagtctgcaaaagctgccagagcagtggctgcggagcgttctggaggaaattaaaggcagtgatccctcatccaaactttgtgctacaaggcgcagtgctgggattcccttctacatacaggcattgttggcatctgaaccaaagaagagtagaatggacttgctgaaaataacaatgagggagctgatctccttggctttgtctgcagatgactcaaagggcagagtccctcaggttcatgctttaaacattctccgagccttgttcagagacacccgtctgggagaaaacattatcccctatgttgctggtggagctaaggctgcaattctgggctttacatcccctgtctgggcagtgagaaattcatccacacttctctttagttccttgatcacaagagtttttggcgttaagagaggaaaggatgaagtttccaaaacaaatagtgaactgggagagcctgatcgccaccctggcatgttcctcttactcctggtgttggagagactgtacccatcgccgatggacggcacatcatctgcgctcagcttggccccttttgttcctttcattatcaggaacactggagacaaacagagaatatacttgctcacagaagctttaagttctcagatgaccctacctgtcagattataataaccggttgccgctcatctggtgggcactgtgttttccgttcgttaccttatttgagctcacagtagccttaaaaggtgtggtcgctcacctatttaccgctcccgggaaatggcagctcgtgcgttggtccccttcattatgatagaccaaataccgagtaccctctgtgctctactgaactcactccccaacagcactgaccagtgtttccgacaaaaccacattcatgggacacttctgcaactatatacctctcaaatattacttcttgcacctcaagtatgaacatacactgatttggcagattatcctgtgcactaaactctgcaacatgctttttcatcaagtattcctatagaacatt

SEQ ID NO: 238 - protein, 710 aa, Mus musculus
VRIDTLGLLCESNRSTEVVSTEEMQWVQFFITYNLNSQSPGVRQQICSLLKKLFCRIQESSQVLYKLEQRKSTPDSENGSIREQPSVTLQQYKNFMSSVCNILFEALFPGSSYSTRFSALTILGSVAEVFPDPEGNIQTVYQLSHDIDAGRYQILMECFTSTFEEVKTLAFDLLMKLSSVTAGQFQDSEKLQDLFQAALELSTSTKPYDCVTASYLLNLLIRQDALPAVLSASSPQQLTRGAGETSAVLERNTLVVIKCLMENLEDEISQAENSLLQAASSFPMYGRVHCITRAFQRLPLNDLRLASEWRPLLGRLLLLSYRLSTVVAPVIQSSSPEGLIPVDTDSASASRLQLILNEIQPRDTNDYFNHTKILKECDSFDLEDLSTSVSNIDSSAEVKGKEEKACDVTAQMVLACCWRSMKEVLLGTLCQLLPVQPGPESSNVFLTVQQVKEIGDYFKQHLLQSRHRGAFELAYTGFVKLTEILNRCSNVSLQKLPEQWLRSVLEEIKGSDPSSKLCATRRSAGIPFYIQALLASEPKKSRMDLLKITMRELISLALSADDSKGRVPQVHALNILRALFRDTRLGENIIPYVAGGAKAAILGFTSPVWAVRNSSTLLFSSLITRVFGVKRGKDEVSKTNSELGEPDRHPGMFLLLLVLERLYPSPMDGTSSALSLAPFVPFIIRNTGDKQRIYLLTEALSSQMTLPVRL

SEQ ID NO: 239 - DNA, 100864 bp, Mus musculus
  misc_feature (1)...(100864): n = A,T,C or G
ttttcctgacctgttttcaagtaccactgggcataggactcaaaggataagtccaggagccaggtggtgacatttcccaccccagtactcagggccctgaggcaggagggcaggaggaactcaagttcaaggtcagcctagctacatagtgagtttgagccacgtggacgaagacagaaggtaaagagtgggagcaggatctgactgctgcactctgtaggatgtctgcagagcctcctgttctgagcagttgagatatgttcgttttctttgattttttttttaatctcttggtaaaaaaaaaataccacatggctatctgtcttagtaattagcattctggggtctctctctctctctctctctctctctcctcttctctctcttctcctctccctccctccctccttcccttcccctctcccccccggtatatcttgaagtcattggtttgataggccaacagtactgtctcttgattctgcagatctaaccctgggatcaggtgacctccatacactctgcacatataaaatgctaacctcttggttaaggtgacgagcactgttgctgtgtgaattttctgggggttgttttctttggctgatttttttgaggcccaggctggcctcatacttgtagctgaagatacccttaagatcctaatctcctgcctctacctccaaaaggattacaaacatgagcttgtacactcagataaagtttccacgtttgattatgtaaattgttagtattggaggaaacttggcagaaggcatgcaggccacatttaacaaactaaatgggtttataattattttaaaagaaaaaacagtggtggcatgttcttttaataccagtactcaggaagcagagacagggctagcctggtctacagattaagttcctatacagccaaggctacatagagaaaccctgtcccaaaaaaataaaataaatacatagattagattagatagcagaaatctaccatattaaatgtaaaatcccaggctccactactgataatttgacaggaataaaaatatgatcatagcatttatagcttcttttttaatttagcagtatgacttagagctgtttcaattaagtacgtgtaaacccacagttcttcttaacagctgtatagtttggctatgactactcacagaaatatccacagcttctccagctggttctgtgtcagtaatttcaaattgttcactttacaatcaatatcattcttgaacatggatatctggaagtgtggctgcaaaataaacacctagaaacacctaggacattgtgagaatggagaaagtgcatgttttccattttgaaagcttttggagttgttttgcctagctcctgttgtgaggtataataagtttgtttgtttgtttggttggttggttggttttggttttttcgagacagggtttctctgtagaccaggctggcctcgaactcagaaatccgcctgcctctgcctcacaagcgctgggattaaaggcgtgagccaccaccgcccggcaaggtataataggttatatgtgcaaaaacgtggctctgccagtaagtttctaactcactgatgaattcatgtttattttcttagttatcaattgggttttaccctttcaaaaaatttctttgtcaaattactttggcttaaaaatagattgtttaaggtccaagaggtagacaatggtaagaggggacgtgatgagtgagagcagggtggaaagacatggcatagcccttgagcctcctgtttccattaaacattgtgtctgtgtgtcctttaacgtaatggcattaacattttctcatatgtattggctatttctatttcatctgtacattatttatattctttgctaaatatttgcagctcccaaagtggtgggccaaggcgtaggatgttttaaaactgagggagaaagtactgtgatgctggacctctgtcaggcgtgtgaactaccagctcaaagtagaatttgagatattagctctcgccatgtctttgtaagattgacatgggtagctgctgtgatagaaagtatgtgtcataagaactaaggtggaacagcaaggagaggagcgcagggcgtgggacatggtagacacatacatcccattagtggccctgtgagaaggcagtcagatgcagaagccctgaaagactttgtgttccttgggtcgtttgaacctacccacctaatgaattcaaagcattagatatgtccattggtctagaggccaccataaaaaaattatggcagttctaatgatgcataaattagggaggtttagaaatctaacctccactccctctctttgagacagtctcattgtgaagttctggctaacctctaactcagacacctgcctgcctctgcttcctaagtgcatatttaatttaattattttcatttttgttaatgagagatgaattaacaaatactttatcctatttttcttttatagttttgcatttttggttttggggggtttgtattgtcctccatacaataggtagggatccaactaatgtatatcacaaagacctggttggttgttttctattattttattgaataagtcattcttattgtagagatctgcctgccctgcctgctaagtgctttctcctttcccctcgctttcaggtataaacaggtaatataagactctttagtggtgtcgcttgactttagcagtgactcattcttgattaattttatttcatttatgctaccaccaacatacctctccctgtgtctcaactgaacaaattatctgttatttttatgggttagttctgtttggttggttgctatttgttttgttagttttcatgggtatgagtgttttgcctgcatgtatgtatatgcaccacaggcataactggtaccaagaagaccagaaaagagcacaagatcttcttgaggatgacccagctaaggaactcaagtgtcattaagatattgcctagagcccacactcctctaaggtctgtgacaggtgttactggcaataagagccccttcattggactctacaaatggcataggcaaatacatgtgcccaccaagcccaaacaataagaagggttctcctgagaaactggtctacctgaggcttcagtcagtatgcctgaagcagaaaaccaatcctgcaacctggccaaccttaaagtgactggaaatgacagatgttactgggctttctccctggctttcccaagacacaggcacatgcacgcacacaaatgcatgcatgcacacgtatgcggtctgcctttgaagtgtttgctatctccacttccagcaattatgtgaagaggagtgtttctgtgaattcaaaagtttagattcttttctcaaccattcccctactaccccctttttcagtctgacttcaagccataaagtacttcagcttgccggcctgtctttagttctgtttgtatgaattaagttgacagaataaatactcacattcccactacaggctgaacagtgtttgcctgtgtgaccagtgagttgagaaaagggggaggagccgacgtcactcgatagatgctatacattcccggcatagatcatttattaagtccgtaaaaataatgcaggtgttttaacagccgaaataaaatcctgtgtaaacataaagtttggaaaaatgtggcagtgacttagctggggttagagtaatgcaggaaggcagatgcaggtggcatactggcctgagtggagtgggcgcaaagtgctcgccaagtctgtatgctgcaggggaaaggctggacttactttgttttgttttgttttactctttagcagaatccagttgtaaaagtgaatggactggcattgatcattagagtttaggatcactgatgggtttgtccactcacccctttaggtctgacctttgagatgactatcctttgtcctactggagttggccttttccatggcctgcctaaccctgcctatgactgctcaagcctgctggcttctgagctcagctgctgttgattttaaagggaggaaactggtctgaaagccacactctgtgaaggagaagcccgtctcagcattgctttcccaaacagccgtatatcatcttgatcttgtctcacacaagtcactattttagtaaagccgcataagccagacatactttactgaggcagtaagagtttttcagggcagtgcctcatgactcttcttagccgcatgacatttattccgcatgcattacattcatactgtagagctgcttttattaagatcctgggctgcccaaatggaccacatgcttcccacagatgcctgctcacctccatcccccagggtctctctgggtttagagtctgggtagagggtgaccctgtgtccaggttctcaatgtggtgcctcattacaacttactttttcattgtaagaaatacaggatcccctgaccttcattcagtacagccccttcatggactcctctttagggcagggctaaccagccttggttgggacagtcagggcatgctgcagccaactgtgatccattctgcctctttctgatggaagcagagtctttgtaactgttctttctctctgcctgcctgcctgcctgcctgcctgcctgcctgcctgcctgcctgcctgcctgcctgcctgcctgcctgcctgccttcgttccttccttccgttgttgttgttgttgttgttgttgttgttgttgttgttgttgttgttgcagttgcatgtatatgtgatgttagggggctggggtaccatggtattcatgtgaaggtcagagaataacttcacggagtcacttctgtccttccactgtggcctggggtctgaacttaccttccctggttggtgtaataagggtctctgccagctgagccgtgaggcagtggagccatcaagtagctgaactgtcaggcatggctctcatgcagcagcaacgctttcgtcctctcttttctttccttgctgagtccactttagggatctgctgtgcctagaggcaaactatcctctgctctaaggttaatagatacacagagcgctgtctcggtctcaaaagatttgctgttttgtgcagtaaatgactgactaaagaaaccatcacatagatgctccctaccccacatctcagtaaatgagatgagaatccagactgatgcagtccccgcccaccactctcagacggctggggctgcccttctgatcatgatcctaaggtagcccagcttcccaagttaacaatatctttttgatgtccaacttcttttttccagctgtcaccctacttggcagcccaagaagggctttcccacgtaagtgttcctctctactcaccacactagagttcagctgtggttcttagagggtaccacaagatcagagtgtgtcctggtcagaaacctagaggagtcactcacactcatgccctctctgcctaccctttgatgtcacacctttcatacattcttgtactttgtaaatatttcattttggttttgatgtcccaaagttgagaaaaatgagcagtgacaaatggcattaatatgcccttagcagtagtgagcagtaagtagctcctcccattcagctatgaatgggtcacttgtgacttgttaggtccactacaagtggaccttctgagtttcaaaagaagttgaaaatagggatgatgctgatatgatgccccccagcttctaaatgtttttacagaagcactcatagcccacgtgctaatagtctttagcccctggttcaacacatcacctcttaactggacttctggcatgatcctggaccccctgtcttatctgaagcagcccttgatatctccctgcaagttacagctcccatccccgcagtctttcctttgaagagggctctgctggccacatgacaggatcaattccatcacattgccagtgaggtcttcctcatcctgacccacacaccatgctgatctctgaccagtcccagtacattttttaaattaggatctactttaagacaatggtagatttatgaaaatattgtgttggtagtacaaagattcccatgtatattcctttcctctcccctaactttctcctactattagtgtttttattagtgtggttcattgttaaaattagccaaccaccattgaatagtaaacaccttttaaagatttttttttaattgtatgtagatatgtgagtgcacatgtgtccatatgtgtgtgtgtgtgtgtgtgtgtgtatgtaataaacattatatatctctctagtcacagattgcagagatctctctgttcccattagctcctcctgaaggctcaatcactgtcagttgcagtctaaagatattaaagttcaaactggttgtgctggcacttgcctttaaattcagccctgtggaggcagaggcagggacatctctgagtttgaggccagcctggcctatagagtaagtcccagagaaaccctgtctcaaaaatccaaaaaaaaggggggggggagttccaaaattgaagtaaataaatttaagtaatttttattatagtatattgttgttttctgttttatttcgcttttgttgtgattagtttgaaagttaaactttttatagatgtgtatatgtatagaggaaaaatacacttacgtaaggtttatattaaccaaggtttcaggtacccaccagtgccttggaatgtgtcctacagagagggccactgagctgacaatatgattcagccaagccaggaaaaagtacttgtcatgcgagtttaacaatttaagttccatcactagaactgatccccaaaatatgttccttgacctctacacatgtgccatcacacacacactagaataataattgaaaagacggaggagactactgtcttactctatttaacatgaggaaacagaggttaacttggttgatctaaagatatacataggtagtcccttggtttacaaccatgtttgccctcagagtgtgtaccatgtgattggagtcttactatttgtctaaccttgcagtctccatcacatcaggagtcaagggaatagaggagaaaggtatcttccagccacgtgtcagccctgaacacaaaggtggtacctacctaagtgtacaggctccaggcgggactgtatcctgagacagctcctgtcagtagagacactaaaccccagcatatggtcggtccactcagtgctgctgagctcctaccatgtactggactcacaaacagcagatcatgggaagccaggcaggtgatgtcagtggcatgcagcatcagggaggctgctgggttctcacatctctaatcctcatgactagaacccaaactgggggagcaggagaaagaggcaggagggagggagcagccctgctgcttggtctctgctgcagttaccagggcactatctggtaataacacttgcttaataagtatttgtggactggatatttgaatgctgttgtacacttgggcccctaaactggcagtatgcttgtcagcactttggtgtgtctgatgagtcctgctccttcactggcctggcagctcaaacttctctatgattactgtttgcaagtcatcccaggcctgggtttaaccacactcagtaccagcactgtaggcaaatgcggaaggagagaaaagtggccttgtgtctgccaacccaagaaccgagagacaagtggctctttccatccagacctccctgagcgtcacactcaatgattatctcatttgtcttgagtccttcaaatgtcatgtgaggatggttgtgcattcaaatcttttcattaatatttctcagaaatactaatctatttcatgtttgtttgcaagcctctccatctgctttgtctcctttccttccctgctctgttctcctctgcttctctaacaagtgctcggctcggtttgtactgcactgcctcttatacttgcttatgtctaccaggtttgcctacatgcccctctgtgtacattggtcaggtacagacatatcactctctgtccttggtgagttactgggattgcagttgttgtctggtgtgtgcccagggtgacagaattgatgggcctgtaggctgacattcataagccagaactaccaagcatttcaaaaacagtcttgtttttgccaagcaaggtgagcaaatccaggccagggcttaaacatccacagggggttatttctaaagtgattgcttctaaatgagaagcatttgaaacctcacagctctcttgacaagtaaattccacagccgtgtgttttgctggtgtctgctgattaattacagcgctgtgacacatgaaagccctggtggttggtttagtgcagctgtggagaaaagaaagcaaggcctagtgactttgccagctcttttgggacagtggggattgagaccaagggaggtatttttccctctggcagtcaccgcataggaacagaagccccggccagcccagttctccaggctctatgccgggtggtttggtccctgcaggctgtggtgaggcagcatctgatctgtgctcctgaaagagcaggtcctttgttagaaaaagcgcttcagtgtgcatacaggggctgggcccacactcccatagactcacccttccaagaaacagtagactaggcatggtgacatacacctgtaattccagtattcaggaggcaggaggatcaactggttcaaggccatccttagctacattgggagtttgagaccaccctgggctacttgagttcttatctaaaaaagggcagagcagggagagaatcttgacctgtgactccagctgtagtcccaaggcacatgtgtaaatgcccaagaatataaaggggcctcttcagcagttgactctggaatactcccacagtaacatcttcatggcaaagcagggaagaaggtctgaaagaatttgctctgacaggtgactaccatgaccctaaatgggttcatctgagcattcagttgacctgtgtagacaaacagcaagaggcccttatagcttgcttttttcacttggcaatgtaaaaatatttgctattattatcacttaagactgaggcacagcctgggaggtggtaccataagtaaagtacttgcacttatcccaagagcccacataaagccacatgtggcagcttgtgtgccagccctgctggcagaggatacaacagaaaagaaaagggaaaacattttaaatttcttatgtgtttattggcactttgtttccttcatccttatatgcttatgtaggtgaccaaccaaacaaaggaattgtgtgccattgaggctttcaggccagagaaccctctgtctcattcattgttccccaaagatctgtgctcctcacaggggcacagtggtctagattgtgtggccaaacagtgccaccatcatacatataaacacttgagagacatcaggctctgatctttctgcttttaattcctggtatataactgtcatgtaagtgtcaagtgtatgccacatctgactgctgtcccttctgactgctaaggaaaagtttcagagatttgtttacagacagtactgcctgcttctacacaggtgtgttgtgctgttcctatctcattggcccacactgccttatgaacccaagtatatgtctaagccacacagactcatagttccttcctgtgcagacttggagtgtagtttcttgtaagattgctgacataaaggtaattccacttcttgtttctacctaagaagctctcgaggctgatgattatgtggtcacggtgatccttggtctagggaattgtgggagtgacccagagcatgggtttgtgtggcccaaccctgggctgcccccagccccccagcctgttttcttgtggagacagagttcgtttcctttgaggaaccattttgaagaaatctcattttcacagccaagtattgtttttcctcttttctggttcaggtttttcatctgttacaagcctacattacagactgcagacacagaacaaatgcagatttcctgcaagagctgagtgatgtcactgcttgtaccaaagccaaactctggctggccatgaggtatgtaaaagcccacgtgaatgaggagacagcactgggtgagtggtgttagagggttgctctttcaagttgtgaggaggtttcagtcgtttccagactttttggagtattttagacctttgcattgtggtgaaaaagtatttcttgacaatttttctaaaattgctaagcgttggtgctaggagtttaatatatttcaatagtcagatgttgcttaccctcgccaagaccccaacactgttagctggtctgcattgtacaaacccttgggtgcttgaaggcactgaagagaaggtagaacatgcatggaagagggaactgaagtttgccaggattcgatgggtagtcggcttatgtcagcaaaagtggaggggaccttttttatttttttttcatttttttcttttctttatttctttctttctttttcttttttttctttctttcttttttttttctttctgttttgccagtcttacatgtgcttgttctggaacttagaatataaagtgatgtgaagagtaaaaacaaccttccattttatcatgtgtagagaaaactcttaacactgtgtgcaaaatctttggatccccagatattggtagaacagtgtctcttcaaggctcctgtaggagttaactttagcaaaggtagttaagaagaggccagttgtgggcagtggtgcgtgcctttaatcacaacactcaagagacaggcaggcggatctctataaatttgaagctagcctagcctgcaaagtgattccaggacagccagggctttcttatacagagaaacctgtctggggggttgggggggagagaaagaagaggccagtagtacttaagacagccctgtgaaatgatgccataaccctccatgaggtagaggaaactgggcaggtcacactgaaagtgtggcgagccactggtggctgtccaccacggcgggtgtggtgatagggtgtgtagtgactgtctcaggccatacttaactgtgggcgtgctcactggttgggtcctctttgtctaaagtgccactgaggttatggaagctgctcagtggtttccctaagtgtgagattgcttgccttctgtgtagcccattgccttcagcctccctaagacacacttccagagaacagaggcctggggtcgcatttgtgccttgtctttacagatcttccagctgttgttctggggtcaggaaatggaggctctccaagaattgtctgctgaaaatcatttttagccataccctcgtcgggagttaagccgtggctctgaagcttgtatagggaagagtctctgtcccttttgctcaggcgcaccagaagtccttaggccattccttcttggtgcatgagaaagaagatggagggacaggccagactttgacgggcacagtttgttcagtgcctggaggtggctgagaagtcttagttctacacagccactcttcagctggagagggtcttcctaccttggcagacatcctccatggtccctgtcactgttgtccaatcaaccttgtcattgtgagcatccctccacccccttctgaggttttttcctctgatttctttagccttagcctagaaaatacagccctgagtcacatgagctcactgggttctgcctccttgcccagagcacaggaaagccacagttgtgcttcctacagtcagctctcttatccaagtgtgaacttcccactcagtaggtggctcctaatgccaggcctcctcttgctccccaacatacggtttttacaagtattaatcagggtgtgttcgagcctagggtagagtttgggaggaaatcgtgctgcagaagctgaggatattccagagctttgcaggagccattctgtattacccacattattgaggaatgccacaggctgagttggaaaccgtagaactccatgtaggtaatgaaaatatcacctgtcctgggcctgccttgtctctgagggcctcttgctgtggaaaatgtttgtctacacaggtcaactgaatgctcagatgaacccatttagggtcatggtagttgcctatcagagcaaaacctttctgactttcttccctgctttgccatgaagatgttactgtgggagtattccagagtcaactgctgaagaggcccctttatattcctgggcatttacatataaaagataaatgtgccttggacttactgaggcctctctgtagctttctaatgtaacctatgagaaattactgttgccaagaaaagaaacttagttgctgggcagtggtgcagcctttaatcccagcacttgggaggcaaaggcaggtggatttctgaggccagcctggtctacagagtgagttccaggacagccagggctacacagagaaaccctgtctcaaaagaaaaaaaaaaaaaaaaaagaaggaagaaacaaacaaacagtttgtttcggttctggcagtaacacattttttcctcctgtagtttattcaatccttgagttcattcagtccagtgagctcgagggtttagggcacgagccatttatctgtccttttgttccaaaaggtttcttttaaaaaaaaaaaaaaattatgggagctacagataatcaagtgaattttaaaatttgaactctgaagttaaaagcatacagacttttgtcatacatttgtgtttatactttacaagattaatcagggtttatttatatgagctggttgagcaacgttgttggggacttttccatgataaatggctgggtgggaatgtggtttgaataaagaacatggcatttgctcttgcaggctgcttttcattccaggatgtcaggagtcttatggaaatcagctcattaatccttcctgtcctcccttctccctttctcagccttcccttctcagtccagttctttcctctggtatgagggcagcggttaccagatcccggtgtgagggcagcggttaccagatccccgtgtgagggcagcggttaccagatcccggtgtgagggcagcagttaccagatccccgtgtgagggcagcggttaccagatccccgtgtgagggcagcggttaccagatcccggtgtgagggcagcggttaccagatccccgtgtgagggcagcggttaccagatcccggtgtgagggcagcggttaccagatcccggtgtgagggcagcggttaccagatcccggtgtgagggcagcggttaccagatcccggtgtgagggcagcatttaccagatcccggtgtgagggcagcatttaccagatccccgtgtgagggcagcatttaccagatcccggtgtgagggcagcggttaccagatccccgtgtgagggcagcggttaccagatcccggtgtgagggcagcggttaccagatcccggtgtgagggcagcggttaccagatccccgtgtgagggcagcggttaccagatccccgtgtgagggcagcggttaccagatcccggtgtgagggcagcagttaccagatcccggtggggtggaaatcttgcccaggtcaggaagcaagtgagattcagaatgagccccgtcctgggaagggatgtcacaacattgtctagggatgtcacaacattgtctagggatgtcacaacattgtctagggatgtcacaacattgtctagggatgccacaacagggtgcagtccaggccccttggatggtcctcctgctgcgcttgctgtcttcaggctgcagctctgctgtcctagcagtcacaggctccaccctaacagaaagaactttgaaaagctctctcaagcaggactcagaggaaacggcttgtttaccttggctgtgacttgggattacaattatattgggcttcagttttttcagaagtggtttgttatcttgtgtttccctcagccataaaagagtaaatatgtattggatgttccttttagaaaacttgatgacataaaccatgtgtgtgggtacacgtgtgttaatcctactacttaggggtacggagacaaaggggctgttgcaaatttcagaccagtctgagctactcagtgaaacagtttcaaaaaaacaaaccaaactgaagaagataagcaggtgagctttgtgtgctgctgggctctggggtggggaatgggatggccgaagggaaacattctctacagaacttcatccctggttttccttggctatcattcatagcaaggaaaaataatttgaaaaacaatataaaagtgaaatctactcttagcacagttctctgtggttacatcatctttttcctttttttaaaaaacatagctaaggttctattaagtataaaagttatagcttcctttttttcacttggcaatatgaaaatatttgctattattattacttaaaactttatggctgctatggaaaatggtatcacacttccttaaaaactggaaatagaatcagtatctaatcctgcagttctccgtctaagttcagagaaagagaaagcaggcttcgatggttgtactgctatgctcagagcaacgttcttcctggtcaccaaaccacagaacagcagtgttcattgctgacaatgtaagcaaaatatgctatatacatatggtaacattagtccatctttaaaagagaagttcccatcctcaactagggattgaacccaggcctttccacatgctaggccagtgcgctgccacagctatatccccaagcagcaagagagatctgacctgtgccaccacatggaggtaccccgagagatggctggctgagcagatagttcatagacacagaaagtagagctgtcattggcagcgtgtgatgggacagccaagagatagaagtgctggggttaacatagtaacttcatacttaaaacatttaaaaatagcaagtacaaacaaaaactaaaatctctattatttcttcagagtttttttttttttcaatttggggaattggggggttgatttttcctatcactatccatctctacaaaaaaaataattttgcctaattttgcctttttgattaactaggaaaagaatcttttgttgaaaagtgggcttaagcatctctctgtgtgtctctatgcctgtgtgtgtgtgtgtgtgtgtgtgtgtgtgtgtgtatgtatgagggggcggagagagagagattgggcttattggtttgttttgctgggttttttgagattggtctcattatatagttcttactctcctgaaactcaccaagatccacctgcctctgcctcccaagtgcgctgggattaaaagcatatgccactataattggcttcattgctctactttgccttcattgctgcgtgtggtgtggagtcagtctgtaactctggccttaggtttcatttctaaaagcagactaagtctcttgagaggcagcgcagtgctacagctgctgtacgttgtgagaccctcgtcccacaaacagtgcatggagaccttgccaaaagtttaagggtttttaaaagttatttttggaatgcctactttgtaccaagctctggatgaagcaatcaatatatatgattccatgagtttatctcaaaatgctcttggtattagaaaattaacttttctgtgttgacacaccctatgtataacactagtttagtttggcataagttcaagagataaggcaaacaagtatggttatgttttcaacttttactttcaatgttttaacacagtaactgacacgctttaaccttttgtttctggttcataaggacttttccctgggctttcccagggtaccactagggcctgggtgtactgtgtgctctgccaggggtgccaggtaacaaacaaaaacttgttcagatcctggtagcaagccatgtgctttatgtctctttgtgtgtgcttgtttgcacattctgtcttgctagcctcctcctgggagagtggggatggtgatagctttaattttactttgagacagacagagccttgctccttagcctaggccagccacggccctcctactgctgggatgacactgggacactaccactctggctctggtcattgcttttaatagagcgtgctttacacacatcactgctgtactcacccagccacttctcccattaggatcccacaggagactgtgactcctggtcttggcactaacaaatgccaggttggctggtagcaagttttcattccaaacaatagttcctgatgctcagggtagaatgctggaatcaccggggaagatttaaaacctcccagtgtcaactcccaccctgagagactctgctgtagaaataaatgcctttgccttcccaagtccactgaagccagggaccctcatgtggtccttgttccagagggtcgtgttacattttcatcttttaagatgtggctaaagtagaacaggcagtacttgggtcagtttgtttatcagccttttctgggcgaggccagactgacttaggcactgcaactatttcttaaaaccacagtgcagtgtaaagagggcaacaaaacaggttctcaggcaaactcctggatctgggatttaaatacggaaaaccctgtgaagtccctatgcatttgcagagatgtaaccctcagaggtcaggagaacccatccatctacacagctgaacaggcgtggaccccactgaaaactgctaatatctgtactcagctgccaagtccttgtcaagctttttcctggaccttactgcctccatgtgtccagacactgcttgtcatgttggactgtctaaaatagagctgctcagatagaacgtgttctcagaagtcactagttagactgaaggtaggacctgagcacctaaatacttggccagctccaagtgagagctgctgttgaccctgagacaaagttcatagtttatgaacttagcaaaggctaagccatcagccactgtagttctagcacccagttagaaatgttcttcccatgctcatggccttactcccccttgctaggcagaagcagactcaagacttccaaagccatcaggcctgcagcctctcccaatgtcagggctgcatggtaccaggacactgtgggaaagttatatttcttggttcaggcagccatccctgtggcctcagggcctgtgggaggactggtgctctgttggcatgcagttggctatttgtcattctgttaaataaatcttatagtctgatgaggaaaataggcttttgagaatatgagaatagatctcaaggtgagtaagaaaaatgtgtgtgtgtgggggggggggttggttggttgtttcagtaaaatggtgttgatgaagggagtaggtatgggagagcttgtgtttgtgggcccactctagtacttggcccctcaagccagctctgacttgcaaactgtgaactgtaacacggctcacctccttctcagcttcctttgatcactcctcccacccctgtgtcccccttctttactagtccccagtaagctgagtgctgttccccttgagggcctatgggtttaagaatgtgagtaaaatgtgcttatagagacaaggctggggcttgcttgtgtgtggcagtcccaggtcttccccagacgtctatagccagcttcagaatctgctctagaaagaattccatttgcttcacaagagctgaagacagcattttttttttctaaccaccagatttattcacacaagagactacactgccagggcagaaagactggggcttgggtctgattctactttcccatggccccagcctcttcccagtctcctgtgttctggactgctctcctccacaggaagtagctcgctcttttgcagtgacctgagaaacagtgtggctaagccctcagcctgctgcagcttgctgtcccacctccattgccactggcaggagtccagcccaaaggggctgttgtagtagggtgatcgtggggcattgtaaggctatcatttgtggtccctgccaagactggaagacacgcgagtctcaacaaggctagctagtcacgtagcacacctgcttttgtgggggggtgggctgggctggacttggtgctttccgttcctttttctcttttcttcccccacctctcctttttctccccccccccttcttttgtctaaaaggtttccccagcagtccctcttcttgacatctgagggacagacagattgagtgggaatgtgaccactgccttgctctcagtctgagactctggggagaggagactaccattaggacttcttcagtcctctaactcagcctgttgaggtcaccttcaacctggtgaagaactgatgggggaggtgggattggtgtattttagatccagacttcttccctttcagacatctcaggagtgtttaaggccaggacaccttgagatcctgtttgtatttttaaaacaatagaagtatgaagttacatttcaacccaaacctgtgaaacaaggtgcaaaacatcctcttcgttacatactgcttttgcaaatgcagcaaggagcaagctgttgaagaagtgaaattggaagtttcttgctgacagctgggcttatgcaggctggtcggggtaaagcagtcttatgcggattagtatgtttaactgagcccaggatccagatccaagcgtcatactgcactggaaagtgaaagatagtcctttcacacagttgtgtaccaggcattcagtccccaactgctgatgctttatgctctttaaatgccgaaatctgcaaccctaccctggagttagtaataagcttgtttgaaggcacagaaataactatcttcctccactcagtgctgttgatcttgggagaatgggggtggaatgttgctgttagaagttttgcacaatattgtcatggtctgacttgcattttcataatactatgtagagccctagtacagtatttttttttccttttaatgtatatcaagttctgtctcttagataaaccagggtcttccttgagccatttccagtgaattaaaaccaattccaattcacagacactagagaacaatgtagtagcgtgatggagaatataaaatgaatgatacttttagggcacagtgggtgtggccttataattccagcactcaggaggctgggacaggaggattgctgccagttcaagacttgcctaggcagcatagggaaaccctgtgtcaacagccaaaatataactataagatggaagatattgtccctgtttcaaaaaccactcggggatgctagggagatggcccagtgggttaagaccacttgttattcttgcagaatacttgggtttggtttccagcaactaacaattagctgcaactccagtcccaggagatctggtcctctaaaggcagcagtcatacacatggtatgcagacatacatataggcaaatacccatatatataaaataaaaaataaatctcttaaaacaaacaaacaaaaatgtctgaccaagacaagaacagattaaccataagcaagtaagagtttaataagggctgagatgagtcactgtagagctgagatcgaagcaataagtgcgagcttgtgggctgaggagtcaaggaagtgttctgagggaaagagacctttacaggctaggtgaggtttaattgttcgataggctaatgctgtgtgattgcagaatgagagaagttacatggatacagcccagcctttgttgactaagaagcaatagctgctactcatgcagcaaggagccttagtgcagagctcagcattgcggtgagcactctcagcatgggctagagccacattagggcctccgttgtcatggtctgcttatcatgcagtccagtgtcatgaaacagttaaccaatcgtggcgctcaaataggtacaaaagtacagacaaaaaggctttctaggggagctggatgtttgagattagctttaaaacaggagtgtggttttaaataccagagtgataggaaagagcctgtcaagatggtgcctctggatctcgcatcatgagcagtgggcttatagaaccagaagagatgctgtgcaagattggggaagagaacatatgggacggcccttaaaggaattggtgcttggatggggaagaggatggggaagagaacaaatgggacggcccttaaaggaattggtgcttggttggtccaggactttaagagacaatcgctggtctcgggtagacactggtgaaaggcaactgcctagacacacttgaaatccaaaatttcagaagctcccgagcagccgtttgctagttaccagtaatggaaatatcatggcttgcatctttgtatttttgttaagaggaccatagaaggagtttatacttggaaagggaatgtaaagattatctcgtctggtgaaattcttccctcaaaaagaagcttttgtggaaactcaagatgctggagctaacctaggagagatggtaaatacagtttagtcagggtgaggcctggaggctgcctgatgtcttccatcccactgggagcacagagtggactaaggaagtaccccgactccatatttcaaaacagtgatcaaataaataaataaataaataaataaataaataagcagaagagatgattggcaaggggttgggcagccattgtaacagatgtggtcccccagaagacagctccacttggggtgaaagtaacaaactctgatttaccttttgcccggcctcctgctgcctgatcatccttgtagaagatcctgcaagcctgcactgttcccaggcctcttgcagaagccacactcctatagaggacccagctctagactttgccattaaaggctgctgttctacacctcttcctgagaggcctgctccggcaggctgctgcctcttctctgccaagcagtgtagattctggtgtgtgagtaagttagttctcctagtcacccagatgtcctgtaggagtgatcttttagtgcctctggagtcatttactctgatacagactttatggcaccatgtcccttccctgcctcagtcttgagctgattaggccctggtacccaaatgccctgtgtggccagggtttagccctcttccaggaagacttgtagggaaggggctggtgtgtgcatgggtgagggggcagtatgggagaggccctgcactgcctccctgcaaagcactcctccctgccccctcaactacctgtgggacctaggcctccacagtgataacagtggcctgcaaggctgtgggagtgccttcccatgcaggccagagcatgaagagccctccctcagcagcccacagcctgtgttctggggagggcctacttcttgaggcagtttaacaggaagcctcaagcctggggcttggggagagcatacatactatagtaaactcaagggaagcactgccaggcagtccctgaagcccactagtgtggcctgtcccatcccatccagaggctccatttttatcttcagagctgaaagctctaaagttaggannnnnnnnnnnnnnnnnnnnnnnnnnnnnnnnnnnnnnnnnnnnnnnnnnnnnnnnnnnnnnnnnnnnnnnnnnnnnnnnnnnnnnnnnnnnnnnnnnnnnnnnnnnnnnnnnnnnnnnnnnnnnnnnnnnnnnnnnnnnnnnnnnnnnnnnnnnnnnnnnnnnnnnnnnnnnnnnnnnnnnnnnnnnnnnnnnnnnnnnnnnnnnnnnnnnnnnnnnnnnnnggaggaaggaaggaaggaaggaaggaaggaaggaaggaaggaaggaaaattagggtaaaaaatggagaaggctagaaaagacatagtaataatagctttgcaatgtgaaagagccaagcacatgagaggggtatttatggtctaatagcttaggctatgttacattgtcaggcatgctggaaagaggcccaacactggcatgtgtgggtgcacaccagcatgccctttatgcttggcacactgtctctcttcaggagttgtgtttggaacataaatacaatgtgtttgtctggaaaaccttgactctattcttggctttgccctgattttggggaggtcacttgagcactataaacagtgttgttgattctgaaaaatggaaaaataatgtctatgtttcttagtaaaaagataaaattaaagaaaaatatgtttgaagataaccttttcataaaatgtggtctactgttcttccattactcttattgctggaactgaggtccaagcctataccatgccaacttcacatgaccatagtttgtcagacatgctataagaaattctccccgtgatacatccagacttgtcattcagcatccagaagttgccattttccttgtctgctgctggaaagtgagctggaagaatagaagctctgttagcatcctatagcataatcaatgctaggtagcctccaagaccaaactacaaagaaggttttctgagatactacttctttcccataattcccagctcatagcttattaagttattaaccagcaatttctctggcagcatattaaactttacttttaaacaagtcacagagggagggaaacatgcatcgctcataaaacagtttcccaggctttgaacaaatcccaaaacccacacaaggtctctttttcatcattctctgcacacagcttgaatagtagagcattaataagaaaaaggtgcttaatgaaaggatggaaaaacacaaaagtctctgggagtccaggggctccctaaggaccctctgaacagaccaggtgagccttcatgcagcaagagggaagtcatggcttgagatggcaggattcccccttgtgtgtggcagaagggaagcagagcaggcttgttttcagacctgccttgagaagagggccccagtgccttcctcagactgtaggtgagccttatgctatccctccccagaacttgtcaaagggtaaaggcctcagctcttctgaatcctctcccctcagagaaaagctgttcccccagaaggaaccatggagggataggtactgggcctttgttacttttccagacacttccagcttagggtcaaatcccctgaagactggtccataccaaaacaaggcactgaggaaaggcttcattttaagagcccaagaaggagggctacatggcagcttctccatttggggtatgtgtgaaagcactagtgggtttagttgcagtaatcacgcagcccaccagcaccagcccttatgaggacaaggtaatcttaggactgggtagcctgccaaccccacatgttgctgccagctggcttgcctgcacatctgattcctagctggtactgtggagggaaatagcttgtttaaaattacatattctgcaattcatgaccatttggcatcgtggcttaaacaaatctccatttgtttctccaagaatgccatatgctggttggttgcccaggctgtggtaaaaatggacctcagaatgggagcaggagcttctctttatttaatttacacttccacatttacatggcttagtgtggtctgcatcaaaggaagacctcctacatcctagccacagcagctctgtaagcaagcacaagctctgtggacagcctccacagccatgctgaactgctgggattgctaagagggacagtcaggaaacccagggactgtcagcagaacgttggctagcacagcagctcctctgtggtcagaaaaggcgtccctagaggacaagcttggagaagaattttaaataaagggcccaacacagcaggcaagggtcaagagcccagtcataacagggtgtgcagacattatgtataaatggcgccttctctgccattttctggcctcctctccttcctcccgcacctgctctgtccactttccttcttccctgatctgatggccattactgctcttccctgctgcccctccccgtgcccacagccccctgtgggctgctgaaggccagggctacttctcacttgcagccgggagctcccactccttgctgacttctttgatctgcagtttgaagcacccagaccaggatgagcctggtcccatcatcagacatgtcagctgtgactgatgtatgtctggcacctcctcctttttcctctgactagctcaatgactttccatgtctccagccccctcctcctccaggacattcattttcattgctttttgtttttttccctcccctctctccaatcttgctgcaggatgcccctacagtattcagtagaccttagccttgggtccacccagagcttggggagtagttccctggggagtccagatcaggtttcctgacttacatgccaacaccaggagcacagagcagaacagttgtttccagccctctctaaatatgacggtggattcttgtggaagagtttgctgctacatatacaaagtggattgtctctttgagagagccccggtgggttcacagtattaagtggacatccaaatctttcagtgtgatttgagctgatgggatgatccataggaactttagcccgttaggcttcagagcgctttacaatccatcagctctaagatctggcccctattcatccttcccgcagcactcccttctggtctcttctcctcatctttcaactctacgttctctagagatgctgtggacccaagtttgtgggtgtaccacttcctctgctggggtcagtgccggctgctgcccagactcctcaccaggtcagtctcctctcctagcagccttcattttgtctattgctccttctttcatgccccaccctatgagagtctgtatgtttctcccactaaaccaatatatttcaagtatttgttttgttttaaatagacaaaaaaataccatacccccccccaaaaaaaacccttttacatggtggccaatagatatgtgtgcatctatgtacatgcatacacagagatacactagacacaccctacttgtgaaatctaatatgacttgaaattgtgaataatagctaataatttgcacactcacctcttaaaacctgcagcagattctgggaggcagaaccaggaggactataacaagctcaaggccagcctggcctatatagcaagttccatgccaggcagagttttaagcttggtggcacacacctttaattccaacacttaggaagcagaggtagaaggatctctctgagttcaagaccagcctggtgtacatagttagttgtaggacagccaggactacacagagagactcttgtctcgaaaacaaacaaacaaaaaagccacccccccacacacacacacacctagggaatctaattcagtttccttaagactcagcaggtttgctttcaggaatgtcagctttcagcatactcatacccttactgacaccattcagtacaatggaaggtgtgtctttacctagaaaaataatttaaaagttatatattcagttattttacctaaactgttgtatttcattaattatttcttatttaaagacacacaggattaatcattctgtgcaaacgctgtaactaaggtcctgacacttctagatacccttggagtttactgtcctctctctctctctcccccgacctctctcccgaccgtctccgtcctgtccctttcactggccgtgctccaccagtttacctcataactgatgaagaggtccatgtgtactgcagtttgaaaaacactattcaggattctaagttccttgagggcagtgactgtgtcatcttcatctttccagaacctggcactcgtcctggctcctagtaacttctgagtagatgttttctgaatgaataggcctcagttaaaacagatcggcagcctctgggattccggaagggccagaagaggtaaataatttatcacaggcttcccaagagctcctgccatcctctaaacactgggcccattgtggatgtgtcctgccttccacctgcagcccccagcttctgggacagagggcagaaggtgtcatggagttcagaaattcccaaggcaaaggttctctggtgggtgtttgtaaaaagacaagtgagttttagaaagaatggtgggagaaaaacaaggttctcagcgagcctttgtttcatcttctatataaacgtagtccccgtgcctgaccctcctgtgccttctaacactactgttctgctgggcccatctgttggaccctgcctgacaagttcattagactatgcccatgccaggattttttcatttggatgaaaaaaaaaaaaaaaatcccagctccctccacccccaaaccgtgtggcttgtttcctgtccagctggcttgctgctctttggggttttattcccctcatcaaagaggcttggacagaccaagaacaaacctctggctcaccctgaactcacatatactgaatccaagtcagagtgagtgagaaagaaagaaaaaagtattttcctgactgagaagccaggtcagagagagaaaactcaacagcctgactctacgtggacctgttctggagggtggagccatgagtggtggtcttcagccagaatcactctctcacatcctcagaaccagcatgggcagtgttgtgaccacaggtctctgttcatgggatctgaagtggcagtgtgttaaggagcctccatagttttgattacaacaagctggcccagagcctcgaagttatggagaagcctgagtgatctgtctctgcagtgtcccaggaagccagcacattgggcagccagtgtatgcttagggaatatgcagggggctctgttcattcaggaacgtttaaaggatgttagctgctgcagcagcacttgggaagcccaggcagaaggatcactgcaagttcaggacagcctgagctaagtattggaccgtgactttaaaaaaatcagcaggttttacagtggcatggctctatctatattctctatatttgggaggtggaagcaggagaatcaggagttcaaagatatcctctgatacataagaagttcaaggccagcctgggctatatgacaccctatcaataataataataataataataataataataataataataataataataataataataataatacaaaaagaaattaacttagctaaaaaaaaaatctcattgtaaaaacctattattcactgagttttaaaagcaaaccagtttaccataagcttgtccagaaaacactcaggcaagaggctgtaatgccccatagcatgtgggagccatcaataacttaggaccttaaggtcactcacttgaaacaacgcatttgctttcccacacatgccatgtgttatcatatctcaaagtgccctctggtcaacttgtccatctgaattcttcccatcttcccctggccacgctcacatatgaggactgagactgcagctcagcggtagggcacttgcctcttacgcttgacatcctaggttcaatcctcagtacagccccgaaagacaagacaaagtaaaacagcagagggtactgatattcttctaggccgttgccatttctcctgtctactctggcgtgtttttttcctccttactccttgggtcttatcttggagtctctgctgtccctgtgtcactaggcagacttctcagcagcctgctgccactctttttgtctcttctccccagacctagcacaaaactcctggggccatttgctcagccctgtggctcattgagtttctgtccaaggctagctgcctgttttctgactttgttacctgagtagtcttttggcaggacagccccagctgttaaaaactgatatggttgtggaagaaagaataacaaggaattgtgactgagaaactagagggaaacaagatacaggcaaagatgggcaagaagaggaaggaaagacaagggtctgcagtggtgcttggttacttggtagacggcttgtaaggatctgaattcagatcctagaacccatggaaaagcagacatggcaggacatgcgtgtaatcccagtgctgtgggagcagagacaggagggtccctgggatttgctggccagatggtcgagctcaggttcactgagtatccagtctcaaagggacgccttgggagtaagaactactgcacaggcctggtggccagtgtttaaatccaagaacccacagagggggaaaggaaaacaaatttaaaaaaccaaccaacaaaaaatccaaaaaaaaaaaccatctacagagttgtcctctgacctcattgtatgtactatggcatgtgtgcacagcacacacacacaatagtacttttttaaatttcttaaatgaaagtaaggggaactggagaggtggctaagggggaaaaggcattgctgccaaggctgatggcctgagttagatgtctggaacccagatggtggaaggagagaaataaatgatctctgatcacccctgtgtcacgcagacacagttcttagatgttgaaagtagagaagtagttgagaaagacgcctggaaagaatcctttctgcacacacaggtagattacagttgtgcaccaccatacatgtgatggtgctccttcatggtagagtatgccagctggaggatgtgtgcatctcagaatgacggtggaagcactgtagggaaccagcagacctgcacctgtacagccacagcactgggctgtcctgaatcctaggtcagaagtagaagacagggttgaacctccctgagatttctctacctgccaggccttgaataccatttccagttgactctgaccccttaatgtctcagtgactcacagggaggcagtaaggtcagtgcagttacagagcagtagtctgctcgggtcacagagataacaagtgacaagctatgtaccagaccccactaggccaggtccttagcacaccaaatctgggcctatgtagtctcaggctgaactgggactcagagccagggcttctcaagcactgttctaaaaagaaaatctaagctgcctgcctatggatctgctgtacaggtccaaagttaaaacgagccaggcattgaaaaaagaaaaacatctcatctactaggaggaccccagctccagtgtgtgttgatctgttcttgttcagtaaccattttcaactggtaggtgttgttttttaaatacctgacttcataagcggtagctttcatcacgtcattttctccagctcagaggggatactacatcttcatagcaccttctccctgttttcacgtcagtaggatagatgtcaaaggcttaggttatctagagcatggcagggcagttttgtcttcttggtcctcacacagactgtggtgatatgagtaagggtggcccggagactcttgtatttgaatgcctagtcgtttgagaaggattagaaccataggagaccaggctttgttgaagtaggtgtgacctggttggagacagtgtgtcactggcagagggctttgaggttgtaaaagcccacagagggccgggatcaggatggaaaggtctcatacactgtgcccgagtgcttccgtggccccttccatgaccatgatggagtagtcctcagaagctgtaagcaagcctccaattaaattctttctttgggtgctacagagataactcagcagttacgagcattgactgcttttccagaggtcctatgttcaattcccagcaaccacatggtggctcacaaccatctataaagggattccatgccctattctgctgtgtatgaagacagcgacagcaacagtgactatgacatagacagagcctctgtcacaggtttggggactcattctgttacagattgctaatttcttcctacccacagtagtccatcattttttggtttttgttgttgttgtttttagtataatgtagctgcctaattacatgcctagtagaaaacacctatttttcccctccccaaggcccaggcaattaactctccattctttacttttctaggcaaaatccatgcctggtaaccagagctgtgtatattgatattctcttcctgctgactaactgcctggacagacctgaggaaggcaagcagacaggtatgactggcagttctcccttggaacattgcaggtagcgttttgggtagcacacacacccacggctaagtgtgagactgactcagaatctgtgtggctctttcctagaagctcaaggagacctgccctcacatatgttctatgtgatcatccaaaaaacgagtgtgaatccaactcacatacctctgtgttcccaagaccttgaccttttgctgttctgtgcttttctttgaaaatgtcattttctgtaatggttcatcctgttccatcctatagatagctgaactggctcgtcccttggtggatatttgagcccctgttctcaatctacccttcaccagttcatgtaagagttcctccctcaggctctgacttcatacatgtctctaggctatttgattcacaaagtgaagtaaagagagaaggatgtcccaaataaaaataatttgatatgttcgtgtaagaaagaggcctcagaaagtgtactacatgagttccaggccccaggctgaaatgtgttctcacatccagctggaacacaggacaatgagcttgcagctaaagcccctcctaactgcttaggagtctaaggaggctgcacatggaagtcaggttccgagtacacacaggccaggccttctcttgctggaatttagcctaaccatgagtcgttaccttcagtaaatatgtccaggctgtcaaagtccagctctgtctaaatggagctctgttaccaaattcaaaccaattgaaagtatttgtggaaagggcattgaaatgtctcacccagattaatgtgttattagctcacagagcccttgtggccatgcagaggtaatcagaacacataatcctctccacatccagtagtataagatcatgttgctttatgggagacgtttcctggtttacccaggcattgtgtctcatacctgtaatatcagcactagagaggtagagacaggctgggcgtggtggcacatgcccttaatcccagcacttgggaggcagaggcaggcgaatttctgagttcgaggccagccaggtctacagcgtgagtttcaggacagccagggctatacagagaaacctgtctcgaaaaaacaaaaacaaaaaaacaaaaaaagggggggggggaggtagaggcaggatgatcaggagttcaaagctatcctcagctactcattgagttctaagccagcgtaggttacatcctatcttcaaaaaaaaaaaaaaagctaacattctaacttgtacctttcatctcaacatagttatgaatattgtcccacctatattctttagactatccaggtctgtgtaataaaatataggtcgttctagctgtgtggcatctactttagtttacacttgagttaactggaatccagcgattataaaaagaacaaaacccagatgctaacaagcaagctgttctagactcttgccttctgatcttctcctcagattccacatctgcagatgtgactggaaggtctgcttacagcctcctcactaggacacccgcagagttgtgtgtttgactgaaattgttggacagtgggttctattcatatggaaccctgttcctaaactctaagccatcttaaagtgctttgcaggggccaaggacatgtgcagccacctcacccagatgtgcgttgtgtttagtctggtacaaaagggtcagcccttggatgctgtgatgctgtgcacctttgcttccccagcttctttctcgtcctttgtctatgaaccccatgaggatggatttggggactctttaatcattctatcctccaaactctttccatcagtaagagcatttgccccagttaaatggcatcacacaccgtcttcactatctcactcgcacacatcactcttcttagcatcctttatggagtaagacttggtgggaacacagcatgtgcctctttctctagtgtgacagtcatggctcgacgtgtgctgtacttgtactgcccagtgagatagaaacaagctcagaggtggcacatgagcgtgtgatgtatgtagctgctctaaagtgagatgttctgtaaatataaaatgtacagcagatttcacagaattccagcactagggaggccaagacagatttaagcccagcctgggctacctatcacaacatgtctatgaaatacttaaaaggcagggcgggtaatagctcagagaagataggcacttgctgccaagcttgacaacctgctactgatccccagaacccacgtgctggaagcagagaaccaacctctgaaagttgtcttctgaccttcataaacttgccatggcaactcatgttcacacacacacacacacacacacacacacacactcaagtaactcattaaaatagagttcaaatgttaaaggaagaattttttcagccgggcagtggtagtgcacacctttaatcccagcacttgggaggcagaggcaggcggatttctgagtttgaggccagcctggtctacagagtgagttccaggacagccagggctatacagagaaatcctatctggaaaaaaaaatttttttttcaaaaaatgttatgctgattatttgttggaaagggaatagttttggcatcattgcattttttaatttattattaaaactaatttcatgaatttcttccacttcttagtcaaaatgtaaggagttctgtgtatagcctagtgacacattacatacccagcatgtgcaaaggcccagagctcgatcccagtaaccacaagacaattcagatgcaagtactaaggcaagtatagtgactcacagcggcagccgaggcgccaggaaaccagaattggagaactgctgcagtttaaggccagcctgctctacatagcaagttccaggccagccaaggctatatggtaagaccttgtctcaaaagacaaaagaaaagatggtttactgctaaaataggaaggagggaggtaagaaggaaaacaaagctatcactgaatgcctgtgcttcactttgtcatggggcagtgcaaagagggaaggcaggggtccaaaggtttaaattccatacataagccataaaagacatggtgtctgtgtatatcgtgttcgcgcatgcgtgtgtgtgtgtgtgtgtgtgtgtgtgtgtgtgtgtgtgtgtgtgtgtgtgtgtgtgtgaatgttgtattcatagaatgtattcatgtaactgtaatagcaaatttccctcctgggtctctagaactaaccaaatatcaaaccgaacagccttcagaatggctatcactgtctggggtagagcagtggccgtgcagcagtgaagtcgctgctgtgttgatggactgtttgcagctccagcagcatctgagcacttggtaaccccgccacccagtaggtgggcccttactagactgggcagattcagtatgtttcgggatcctgttgtcatatcacattcctcttgtaagcttccagaaggatgaaccatggcttgggttctgtgtagcctaactaagctctgtaatatagtaggcctcatgaaacagggtggttattaactgatggactgaaatgcagttttcatcgatttttaaaataatctgcttgctctcaggatacagtcttgccagatgtggtggagcaccctgtaatcctagcttgggaggtggaggcagggggtcaggagttcaaggtcatcctcggctacataatacgtgtgaagccagctgagctatacagaccctgtcgcaagcaagccctcctcccaaaaggaacagccttacttagtctgattcatcaatctgatgtgaattagtgccccgaattcaattgtgttgtttatatattcatacatgattataaccatgtatatatgtgcctgtactattatctcacaaaactcataagtacaccacagagactttgaggcctgatcccagatttgaatcctacttctgcccacctgactttctttccctctccctctccctctccctctccctctccctctctctccttccttccttccttccttctttcctaccttctttcttctttcttgtattcttttctttttcttgaccttagcatcatacttaacttctgtaagacactttttctcagttgtaagtgagaataataaaagagtgtatgggaccagcaagatggttcaccctggtaaccagagttccatttccagagctgacgtgatggaaggagagcactggctcccccacagtaggttaggttatcctctaacctccacacaggtgctacgggtccatccccataaataaatgtagttaagttcaaatggaatctacatcttagagtcagcttcatgcgagcacatgcttcacgtaagcacaataaatatgtgctcagtatgtactcgctactgtgggcttcatgatgtgcaccactgctcatcatctggagccttgcatccagcctggcccctgcagccgggcatcgctgtgctcctcctacgcatacatggctttcctcccagtgtttaccacgtaggaaggaagaaatgcttgtgtgcctgcttaggcgtctccaccacccgactgaggtggacaaagactctttacttccctttatattcgtgacagacgtgagtgtccgatacctgtgcctggagctaagaaggaagcacagtagggactagagggggcgctttccaagatggtacctttctccgtggggatgaggcctttgcagggaagagcttagtcagattttcacaaatagcagggattcagaagatgaacaaagatgtggatgttacaaacagaaaggaaatctacactactttcaaagaattggcatttggaatttggggttcaaagctaaacaagtgctactaaatgtgaggcccccaaagcagaaacagtcacacaacagccccataggccaaaatacaaggagcccagatttgactttataagcaaaggaagctatttcatgttataaagcagtagggttaagtgggttttaaaacaacatggcctctctttgtctgcacttttcctaaattcccagcacggttagggagacaagttcttataaataaataaatatatatatataaagattcttggggtggtgcattttaaaaatgttctctttgttttattgtgtgtgtgtttagcatatgtgttgtgtgtgcacatgtgtgtgcacatgtgtcagcactctcgtaccacagcatacaaatggtcagaggacagctttccagctttcgttctctccttctacctcatggactctgaggatcaaacttaggttatcaggcttggtagaaggcacctctacctgcagagccatcttgccagactacatctcctttttgttgaggccatatcttaccaagttgtcctggcaaacctagaacttgccatattgatcaggctgaactttaaatgacagagatttgcctgcctctgcctcccaagtgctgcaattacaaacaaatttaataagtccagcattagagaaaactcattcacagactgtcatggaggtttgtttggttatcatgatggcagagaatggaggaccagaccagagtgaaaggtagccatgctaaagaatagctcagggggcttaagtgggtggagctgtgggaggcatcttccgagtatttccattttactaatgttatagcacacctcagtttcattcctgtgtatgaacgtacactttcattacatttttgtgagtgtgtgcatacaggcacgtgttcgtgtgtgtgtgtgtgtgtgtgtgtgtgtgtgtgtacagctttgtgttgattctcttctgtcttgtgggttctggagattgacctgcctcatcagacttgggagcaagcacctcacgttctgaaccatcttgcttgtctggtacatttcatagtaaatttaattataaatgggactcattgccaaaataaacaaagcactaatttgaggaagatttttggtttaggttttgcatgaaagaggctctgcccatccctcaaactgtgttctgttaacagcattgaaaggccgttcctttcagtgaactctgaggtgccttagaataccttggggggggggtgacaggatgagaagaaccccattgtgtttggagtttgaaagtgatttaacccctgggagcactgagtcctctgtatccttttttcctttcctgccatcattagcttacctcagtctctgtcaggaagaaaaatgagttgcagctgcagctgagagaaagggaaagtcttctagaagcccagaggctgaggtgtaggcctgtgcaaggggtgcaagggcagttattcaattctaatctaaagtctaacctaagctacttgtactcgggaaggaaatgtcccactaaaatatctattgctaaaataattccctggtacttgctaaatatcccgtttgctctgagagataatctgtttgcctgtagacctaccccttacatttgttttcattttgcacagctagagtttatttaccacatatttaaataaatatacttaacacgtctcttcctctctccttccctccctcccccttccttctctctttttggtgaatccatgagtggttatttctttctcaggtccattttatgaatgtagttgttgttgccattctttttgagacagggtctcatgtagcccaggctggcttcaaactcagtatgtagtcaagagtgaccttgagccagcatggttttatgccaggctcaagactgagctcggcctcgtgcatgctccatcggtcaaccccatgttacttacttggtgccatctggttgtagtgttctcacccgttgtcttctagtttccattgctgtgaagagacactgtgaccaaggcaccctagcatgtatgcaggatacctatgctactctgctttcatctcactcatcacgtttaatgacggcggccagcctttgtagactgctagctctgacaagtgctgtctccagcatcccgtgtgcgtgaatggaggaggtgctgctgatggtcctcatcgttcacaatgaggcagagagaagcaccgagagtcctgtgtgtcctaagactccagagcccgagctccccatctcccacaggtggcatgtctgagagacggccatcaggaaccctgagacagccctcctggatcagctccaggccgacttccctgtgctgcggcttctaagtcacagtgtttgcagtgtcgtccctaagagtgtgggacaaccttaggccagagctgggactcgggtgtattactagaaagcgagcacttgccactctgggcaggacccgccctttgcgcctttgaaaatagacatacttagggccaccaaacaacacttcccagaggcagggtgctgggacggttctatgctttctttgttagctggaatttataggtcggatctcatcactctgccaagtacaataaacactccttcatcgggaatcttagtttatagtcgttactttttccttctggatgtcctacaagtggccagctcacacggtgagtcagaaccctaactgtagctgccgcgcagtgcgctgtgtagaccacagctgggtaagaacacaggccactctgtaatgagctcggatgtgtagactagatgctgcttcgtgagatcagccctccctctggccagcctaggtgctatgggtcaaatggtgaagtctgtgcgacgtgttcagcaatgcttgtgtttgtattgcttagaacatgagcactgcatgatgtaaagaaatacagtccatgatttttatgacccatgaacttcctttacctcattcctaggaaatgcagctgaatagttagaggataaagcagtggcagcctaccaacgcctgccatggttagccaggctcgttgggttagctgtagccagccccacctgagcagctgggcgggatttgtcctgtcctggttgtgtgcttttagtgtgcgtgcagacctgcctaactgacacagctgatgagattctcttggctggggtgagagagcagggggaacttgagaacagtttttagaggcttctgggacttttgatttctaagcctgcacctatgaaatttcaaggacgttaatgttcacgttttgtcatctatacattagttggttttctgcagaaactggactctggtctgaaatgttgcttttcaacagtgcactctgacataagcagctagctcccttctgcagaggtgcaaagcagggtggtaccggatgagtgcatagcatgttaactctgtgagtaccgtgtacagaggccactctaagaactgcagtctcatactgtctagtcagtaggaagatggagactctcccagggagtaacttgctcagccatgcagctggttactgcaaaggatccaactgccatgtcagtcatcgaaaataaggatagtaatgtgtgacacttagtcggactgagtgtctgtgtctgtgacagaaccacgtcctgaaacttcctgacttgcactcctaccccagagaaagaactgttcaaatgtgcaggatgacctcagaactctgtggttcctgtcccttacatgttcctgcctctcccctctccggcccttcatcaccaatcatgagaaactcattggcctgtctgttaaattgcagtgcacatagctttttcaagtctgtcagagatgttttgcataaacggaaagcattcctttgtggcctttcatgtctcgctgcttcgctccatgccttcgagtttcatccgtatgtagcctaaagctgcactcacttgggtttatagctaaataatattccactgtgtcagcatcactttttcagtcattatcaactggtgaacatttggtttgcttctacgtttggtcttttgtaaataacactgctataaatattcatgggctcttttttttttcagttcttctgagtaaattgcacataggagtaaagggggttgtggagacaggggataggaggagaagaaagggctggatcagcttcttgaggaattgaagtcttcctccagaaacacccaaggctcctagttctccccttcctctgccgtacttgttactgcctgagtacaattgcctgttgtgagtgcagtggccctggctgggctgagctctgacttccctctgactggtgatacagcatctttcctgatgtccattggacatttgtctcgagaaatgtctgttcagactttttgctcatttttaaaagattcattgtttatatgtatctgtgtttctgtatgtacatgattctccacacagaccaaaagaggggatcagattcctggagatataggtggttgggaactgcctgatgtgggtgctgagggcagaacttgggttctctggaagagcatcatgtgctcttaaacatttagccatctctccagccctcctttgcccactttaaaattggattaattatattttgtacttgtgaaagtacattgttcgatgtgaaccgtgactttttatgtgctaagttagtgttccactgtttatataatttgtttatggatagtttatcaacagttgatagacatgttggctattttttctgattagagaatgtcagatatggagccctgaacatcttcaaagaattgtttggttaaatgctttgatttttcttggggaaaaaaaaaaaacctaagcaacaaaacaaaaacaaacaaacagaaccagatgctgccaggtggtgggggctcacaccgttattcccggcagtggggaggcagagacaggcagatctctgtgaattcaaggctagctggtctacagagaagttccaggacagccagagctacatagagaaacccccccccccacacacacacacacacacaaagaaagacaagaaaaaaggaaggaagacagacagaacaagaagaagcatgtgaccatttttaatatcttttctggaaattctgtaaatcttatgttttagtcttatgttttagtaaaatattttttgttattctaaaaaaaaaaaatctaagcagattattaggccataggtaaaaagaaacagccagaatgtttatcagaagagatgcccacttggcattgccaccagaagagtggtccagttgctctgtgttctagccaacacttgacatcagcgtcggcagctgcatcgttgcagtgagtgtatgtagctctcctggcgtgaggttacatgaagttccctggttagattgtctttccgtgtgcagtatttgccatctcaacaaagtatccattcaacattttacatagctctataaactgatgtttgccttatcattgagctgtaagttctcttggagggggggcaagcagacagacagacagacagagagaacatgtatgtgccctcaggcatgtgaagaggacagcctgtgagaatcagtttttgtttccaccatgtgggttgtgggactcttgactccgatgatcagcttcgctcaagtgcctttacccacctattcatctggtaggcctgtggttttgtttcttatgctgtgtgtgagtttataaagataaacatttggtggatagttttttcctatctttgacttacattttcattttcttaacagtgtttttcaagagcagtcattctttttttttttctaagatttattatgtatatatagcactctgcctgcatgtatgcctgcaagccagaagagggcaccagagctcactaaagattgttatgaggcaccatgtggttgctgggaattgaactctgaacctttggaaaagcacccagtgctctttttttgggggggggggtggggtttcaaagtcagggtctctctttacagccctggctgtcctggaactcactttgtagaccaggctggcctcgaactcagaaatccgcatgcctctgcctcccgaatgctgggattcaaggcgtgcgccaccaccgcccgcccagcatatccagtgctcttaacctctgagccctctctctggcccctcattcttaattttaatgaagtccagttgattgttttcttttgtctttctttctttctctcactcacttcctccctccctctcttcccttatttatgtggaatgactttagcttttttgttctgttttaatcaggggtttccttgtatagcctaggctggcttagaactcatagtgtagtccaagctagatttgaactatcatcctatcttctccaggatgctgggatagtaggtctacactattttttttcttttttttttaattggatattttcttcatttacatttcaaatgctatcccaaaagtcccctatactctcccccaacccccgccctgctcccctacccactcattcccacttcttggccctggctttcccctgtactggggcatataaagtttgctagaccaaggggcctctcttcccaatgatggctgactaggccatcttctgctacatatgcagctagagagacgagttctgggggtactgattaattcatattgttgttccacctatagggttgtagaccccttcagcttttgggtactttctctagctcctacattgggggccctgtgttccatcctatagatgactgtgagcatccacttctgtatttgccaggcactggcaaagcctcacaggagccagctatatcagggtcctttcagcaaaatcttgctggcttatgcaatagtgtctgcatttggtgactgattatgggatgggtccccgggtggggcagtctctggatggtccatcctttcgtctttgtctcttcaactccttccatggatattttattccctattctagggaggaatgaagtattcacacgttggtcttccttcttgattttcttgtgttttggaagttgtatcttgggtataggtctacagtattacccatagatgtttcctgctttgtgtgtgtgtgtgtgtgtgtgtgtgtgtgtgtgggcgccctagttaagtccttgttatctcaaggtcacaaagatattctttcatacttttttctaaagcttagtgaggttgtatttgatggattcattggttggttggttggttggttggttggctggctggctggctgttggttagttggctggttggttgattggctgttggctggctggttggttaatgatcagcccagggccttggacctgctaggcaagcactcatacacaactactgagctgcatcctgagatctaaagctttatggctctagattttatatatgtgcatgacctacatctatgtaactcctatgtatgatgtaagataaatgtctcatatgattatcaattgttctaccaccattgtttctttgacctttttttttttgtaccttgcccacttcctcccctttcaggggttcttgtcacatgtgttaggtcacctgaaggtttcctatagccaccccacgttttaggctttttctttgttctttaatgtgtgttccatttttcacagcttctatctctgtgtcttcagattaactattaactagtcttttctgttgtgctctctcatctgctgtgaattctgtccactatgtctttatttcagacattggactgtttatctctagaagtttcattttgatctttttcaacttctttgaaccatcatcctaccttccccagagtgctgggataatagatctgtacaacataggagtctggaagttaattgacagcaaagaagggaggctatcacgtggagaaagagcctctgcgctgatgtttgggtgtctcaacccattttctgctgctagaaacatcacagaaaggctaacttacaaagaaaatagatttctttggctcaccagtctagaagtgaaagaacttgacatcagcatctacctggcattgtcgagggcgtccagtagtgacgtccatggcagagggcagcagtgtggagagcatcctggctcagacgtctctcctctttttataaagccactgttctggatcagggcctcagtcttgaattttcactgatgtctgtcagcacccagtgtgtaaattcccacccttttactgcctcgtctggggttgtggtgggcacattaaatacaacaggaatcctggtgcccttcctccttggctcacctcctgttgcttacctggaagaagttccttaactcctccctccatggtggacttctgcaacccagccagattctgctgggctcgcctgctgggagccctccctgcactcctcctcttgtagtgtgtctgcaatccagtagttccagaggcctctttgctcttagattctttttcttttctttttgcaatttattcattttatgtatgagtacactgtagctgttttgaggcacaccagaagagggcatcagatctcattacagcaaccatgtggttgctgggaattgaacttgggacctctggaaagggcagtcagtgctcttaactgctgagcagttgctccagcctccagattctgtttcttaagtacatactttagagctcaggcagagtctcaggactgtcttttatcactgacaaggactgagattgcttggtcccagtccctctcgatgctggtaaggcaacagaaatcgaccaaggtactaaaaagagcctgtctatccaggtgtggtcctcagagtgctttcatggtgtctcctgttgcctggaaacatcagagaggcctaaaatcctttgtgggaaataggtcaatcaaagggtggcaggtgctagggtttatggtggtgcaaatcccctccaaatcttgcactgtggtgcagttctttgaagaagcagaagcagactatgttgggaaataactgcatgtttgtgtctttagttcgtcctgtgtttatctgcagtgtttcctgattggctccctgtgttgggtaaaggctgctgggatggaactggagggaagtagttagaaattgtagtcccccccccatgcactcatcccttcccttctgtaatcttctgattcacaagttagaagggctgagctcacagcttatggcttaagaaggtgttcttcaaatagtatacttaaaagacatcctcagtccgtccccaccagcacataaggattctttgcttaaacacacctgcccctgagctagcctggtgcataggcctgtaatgcgagcacttgaaatgcaagcaagaggggctgaagttcagggccatcctcagctacatagtgagttccatgccagcctaaaactgatatttgggaggatgagggagagatgcatgattctcataacgttctgacaaccagagtttcctggttagagtaactactgctgcgatggaacactgtaagcaaaagcagcttgggaggaaagggtttatccggctcactcttctacataatagtccatcattgaagacagttgagagaaacttaagacagggcaggaacagaggcaggagctgatgcagaggccacggagggatactgcttactggcttgctctccatggcttgctcagcctcctttcttatagaacccaggactaccagcctagggatggcaccacccacaataggttgggctctcccctatcaattactaattaagagaatgccctacaggcttgcctacagtcagatttccttaactgaggttttccttaactgaggttcccttctctcagatgactttagcttgtgtcaagttgacataaaactgtccagcacacaggggaaagtgatggacacctctttgaagggtgtcagagaaccaggaacaaatctgacaagaaagagcaggccaagaccagctcagagaagacctgtttccagggcctctcccagcttctccatgtttgtaactggaagggcctctggggtcaggatcacagctttactgggagaggcgttggattaaacagaagaatggaatttccctttgataaggaaaagccaaaaattaataaatcagctgattttgttgttgtagttcctatggtttccttttctgtacaagtattttttttactgagaaattacataacaagacattaacatttgcagagtacaaattatcagctgattatttttagacccagttcagataagaacttcacttggctcggttgtagctctcactgacctgggagaaggtgggacaccccactgcacatcgagactttcttagcccctcctttaaggaatgctgggtgaaagtttaggactactgtatctgctcacttggcaggagagggtcctgtgtatcccaggatgccgtgtacccactctgtagccaagtgacacgagcacttgatcctcctacctccaccgcttcagtgctgggatgacaggagtacaggacctagagtatgtggactgggaatccaactcaggaacttacacatggcaggcaaacaccctaacaaccaagccatatccccagccaatctgcaaacttgtattggcctagccgcatgagagaattcagagctttgcagaagacagattcagtttgaggtgagggagcagcacacagggtcaagtggaataagagcctctgaagttcagtggcagggagcctcaaaggaatatagtaagtctccttgggatttgctcatagccgctccacacatgctgctcttacagaagacctgagtgtggttcctcgcaccctcctctggcagtgcactgtgtctttaactccagctctgtggacctggtgcccacttttagcctccttggacacagacagatacacatatgcacatcacttaaaataaaaacacctttcttaaattggtaacttaaaactgactgctctattacttaggacttgattttatatttttgagattaagtctcattgtgctagccttgaactctcagggatccttctgcctctgccttcaaagtgctaggattacaggcatgagccaccaaacccaataatatgtttctccaatgagaaaggtcatagtacagcaggaggtagttccttccgtatgaatccagccattaagtcattatcttaaagaccagaaatacgctttgcttagaagaacaaacaaaagccatatctgaagatgagcacacatcgagtgtgagactcagtaacacagtcctgagtgactgcgctgaccatactgggacatgtgaacacttcccaacagggaagactggaaatgtctatgcaaaataggattgccaaagccatctgaccctcatacaaatacagtggggccaatcaaacaaggacttggtcctttcagtgagaccatggcttcctgaggcaaaacccaatcaagtttgagatgacaaacagaaaagttagtttaaaaattactgcccgctagagaaagctgttaagcttcataccagaaagctactgtcaggttctgtgccctgcttataaaaggcacccattaaaaacaaaaatgtaagtaccgtatgttgaaatagactgcatttgctaccccaagacatactttgtcagagagatcctgttgggaaaccttgtggtgagtgctgtagtgggtgtggaagcaccaacggtagctgtcagtcccagatgtgcaccagagtgacctgggtcactttaaagctagacatgctttgcgaaagttccccaatgagtttcccatgctccctgggctgagaaccactgtagggaaggaatgctgtgttatctctgcagttgttcataataaaaaattgtgtactcctccctccagcctcttgttcctcctagaggccccctcactggtcactaggttctgatgcacagaggggagggtgggacctccaagaagtagaggctggtcttgttaattctctgctacatctaagacttaaaagagcccaagaactgtatgtggtgagcatctacactgtggaaggcccctctgtatgcctgccctgcctgccctgcctgccctgccctgccctgccctgccctgcctgcctgccctgcctgcctgcatgccctgcctgcctgtctgccctgcctgtctgccctgcctgcctgccctgcctgccctgcctgcctgccctccttgcctgcctgcatgccctgcctgccctgcctgcctgccctgccctgcctgcctgccctccttgcctgcctgcctgccctccttgcctgcctgcctgccctgcctgcctgccctgccctgccctgccctgccccgccctgccccgccctgcctgcctctctgccctgccctccctgccctgcctgcctctctgccctgcctctctgccttgccctgcctgcctgccctaccctgcctgccctaccctgcctgccctgcctgcctgcctgccctgccctgccctgccctgccccgccctgccccgccctgcctgcctctctgccctgccctccctgccctgcctgcctctctgccctgcctctctgccttgccctgcctgcctgccctaccctgcctgccctgcctgcctgcctgccctgcctgtctgcatcatttgatcatgtttgttcattcttctgaatgcaccatgatgaatgatgttcctttaccctactgggaagtattaagccagcatcagctgcacttcacttagaactgcagaccctgcctacccagtcataaacccagcaaactctgggagagttcttcggagtatgactgtgccagaacacagagcagattatcttgtcagcttctgaacaagccagaaatctgcataacctgagaccagcagaatccactcctcttaggaccatgtgtgtgtgcttgagggctgcggttcccaaaatccctgcatcagcaactgctagaggggtggcttcctcagtgagaactgcgtctgtgctttggccaggcatgatggctcacacctgtgattctagcatttgggaggctgaagcgggagaattgtcacaatgtatagccagctgggtatgcataccaagatctaggccaacaaggaccttttagggataatccaaacagtcgtgcttgggctaaatcttttttgtagagggcttgcctagcatgtatcaagccctaacacttcaggcgctaacagtgtgtaatccagggatggtggtgccgtcggatggattagggtcatcttcagctctgtgaaacctgagaccttatcaaagaaattagataattaattggttaattaactaaaacagagtactactgatccctccaggggagccacacttaggctccaggaattctgcctgggccacagaggtgataaaggtgcttgcttcacaaacctgaatctgatccctggaacccatgtaaacatgaactttgagagtcaactccactggtgtctgactctcaacatggtaacaagtgaagtgacatctgaggaaagtggacttgtgctgtatctctttctgtccccactgttgcccagcataggaacagtttgatgcttttctaccacgtggacagacctgaagcacaatgcttggatgtcatggatatgccttccagctcttctcacctcgctctcctactagagcggatggtttttaaagaattcttttgtttaacttgagtgtgtgtgcacacatgtgcgtgtacacacacacacatacacacactgtgcctgtagaagctaaaaaatgatatcagctctacatccagggcatctgatgtggatgctggcacctgaactcggattatctcaagaacagcaaatgctcttacccactgagtcatctctacactcccctgaaaggcagttttaacttttctcagtagtacccattacactcttgttagtccttcttccacttttatgttttctttacccatcttagctggattactattgctatgataaaacatcgtcaccaaaagcaagttggggaggaaaggttttattttattgaacttacacttctatatcactatataactaagttaagacagagattctcacagggcaggaacctggagctaatgcagaggccatgctgcctatcggcttgcctcctcatagcttgctcaacctaccttcttacagaacccaggaaagaccacaatgggctgggccctccccatcgataactaattaagaaaatcccttacagctggatcttctacagctggaggaaggtattttctcagttatggtccctccttcccagtgactctagcttgtgtaaagttgacctaagactaaccagcccattacctatcatttcattggtaacttggagcaaataatttaacctctctcttgacttacctgtaaaaaaggaatagtaataatggtgctgccttattcatgcattgttaaatgggtagaggaatgcccaacagtgtccattttaaaagtaattttaattcataatgttaaataatacatgtaaactattttatagtgataaaatagtacatgatacatgatatgcacattggctcctataattgattcactagcaattttagaacagtagacatttgagactttttatagttgcctttgaatattgcgtacatggctttattttcctttagtcttaaggctcttctataatagatagttctccttgtcaagctaaatctttgtgtgtcccagagtactcagtgcatcaactccattggcatggaagaacaggtgtctgtacacaagggactttcccaaacgtattcccctcccagcatcctggagagagcaagctgctcctgcgtgccccacctggagttcaggagaccatactctacctggaacatccctacacataacacaccactcagaaatgagccaagcagttctgcgttttaattacatttgggtttattggtttggtatgtttttctgaaatagagtctttctgtgtagcctacgctggcctgaaccttgctatcaccctgcctcagcctccagcctgttggaatcataggcaaacaccaccagcttggctcttatgacttttattttatttattatttcatgcgtatgaatgtttttcttgcatatatgtatgtgcactacataagtgcccggtgcccttgaaggtcagaaggtattgggttccttggaccttaagttgcaaatggttgtgagccacaatgactgtaggtgctgggaaccaagcctgggtcctctgcatgagcagctcctgctcgtgctctctaagctgtctcacgagccatgtttctgacttctgtttagtgaaatgttgtccttatagtgcagtgggtgaagagggtaggattatcctgccagtttactaaaggacatagttctaccttacttcacatgcacccaaagccagttcgtgcctgaccatcccttccatccttcattcctgggtatactgagactacatatgaatagactttcttttttaaatcttcacaactaaaaaacagaacataaaacttaacaggtaaacacggggtatacgaattataccaacagagagaacaggctgacctaagtcccgaatacaaggcagctcccctctcagtaattatagaagagggttgtggcttttactaactctggatcaggatctaacagcaaggccagtagcctggtgtccagagcaagagaggttaatggccccgctggatgaataatgcaggatataagaatattctgtgttctaagttaagagagggtcagatctgcccatagcagtacaactagaacaggaaggggaattcccttgtgacggaaaggaagtagagattttcatctgaagaaaacagagtaaaataatgatgttcaggtgcctacagggttatcatgaagagggcagaactaggccagtgagtggagtcctagaaaaacctgtgtgacagttgtactaacagtgaaatgtgctgtctcctgagctgcaagtcaccacaggatccaacccagagcctctggtgcattacagggacccaagactgaggaagtctggacatttaccctgggcacttctggggcttcccagttaaggttactcggtttggatttgttgggtgtccagaagaagggcaggagcccattttctgagatggttcctattctcctgtatccttttctgggaaaaaaaaaaatcaagtgaaattactacttctttctctccacttttttacttctagctctggagagtcttggcttctgggaagatgtgagaagaattatcctggaatcagagctgattaaggggttcccctggaccttcaaggtgccaggcttgccccagtatctgcagagccttaccaaactagccatccctgaagtgtgggcgtcgcttgctgaagctaaagggcaggcgactgctgttcctctctccttctctcggcttctgaagtcttcctttcctgaagtgcgcttgctagccctagacaccttgctggaaagggcaaggtcctctgaacaggagcagaaggagccacttcctctgctctgcagtatgggagaggagcttctactgctggcgatgaaggaagaccaccccggatgtttctgcagggtaggtgctctgctgcactggcacccctctgtcccacagtttggaaaccaccagaaagatacaaatgaggagagcaagtcagacaaaagacagtagcttagaatcccaaagagcagggctctatacgttgcttggctttatgctttatgtatagaaagagccctaagatgccagtggtacttgtaaagatttagtggtcataggtcaagccactctgtctttaggaaagatcattgaaaattagctgtgggggtggagcgagagcactgtgggcactgcttgccacgcaagcctaaggaccacagttcagctctctacccgtggaaatgccagctgctatgccagcacgcaggggataaacatggagtccctgggagagctgcatggagacagactggccaaacagtgagctcccagggcactgggaaaccacagagaacggtgatgggaaacaaccgatgtcacctccattagctacacacagagtagagctcttcttcactcacacatctctttataggcagatggctacctgagaagtttagtccaaatgaacatgaactctcagatatgaaggaggctggggcacaagaccaaaggtccaaaggtagcctgagtccttagtgagaccccgtctcaaaactaagtagtaggaaaagggaggaaggaaatctgcttgctttagcatgtgtgagaccatacaggcttctagctttgatgttaggtcaccaaggaccctcaaacttctcattgttctaccctgactcagtttctctaagatgttagaaaggaaagaagaagtcagtgaaatttgggggccttctgaaaatagattcccccttccttgttgttaaaagtgatcttgatttaggagcacaagacttttgcctatgagtttccttatcgtattttctttgatttgacttgtaggtcctaaagattctctatcacttgaaccccagcgaatggcttccccagacagagtgctatgctcacctctccccaaaggagttcctcatgtggagtatggatattgcttccaatgacaggtgtgccctagggcttttgcgcagtcgtggcagactacacctcttcagtcatcaggcagggtgcctgctcactgcgctccctgagagctcagatactgagcttcattctaagcctcagcctaggagctgggttctaaactctactaagaaaagtggcaggttttcacactagtaatcaaaaagtacaagcagttgtgcatgcagggaaagaattcacacctacaaaggtcatagactagccacataaacatttgtgcataaaatatgttaagtttgggcctggggatatagctcagttggctaagtgcttatctagcatcagcaaagccctagctgaggcctggtaccacgggtagcactgacccataatcccagtacagaagaggtggagatgagagggtcagaagctcatggtcagccttgcctacatagtgaccctgtctcatcttaactgtagacttgtgtatgtggtaattagtgaggatttgtgagtgtgcatatgcctgtgtgttaattttgttctattttccagatctgaaatccagggagtagctctgaagcttgcctctaaaataattgcctaccgtgtacagagttgcgagaaggtgaggctaattctgtacctgtcctgaggtctggggttttacacagagcgtgttagtaaaatgttaacagccccagcagacagaatcatagtgactccatagaaatgtggcttgtgctgaagtttgcaaagactctgaactttctctttcttctctcttgttttagccatttctgactagaagcctctcagagtgacagtccccaacatacatatgctgattgtttcctccccatttctgtagctagactgtattttaagaggagtaagcaagtcagttctgagaatatttaagattacaatttataagctagtaagtctgatgatatattacacaggctgaaggtgaggtaggtgccctgcctactatgtggctgagctgtatctgaaccaggtcctatgtgtgctctacctgttccacatgccctttgaaggtgaaatggagccaaaggaagcaaagcagcttcgtgggaagatgctgtgagacagatacatacatacctaggtgtgtatgagaggcataggaccaaggctcataaacttgctgaagaggggaaaaaagaatgtaagagccacaagacacggagaaggcagggaactcccattctccagacacaacacatcagtataacccccagtagctatgtttacttataccatgtccgcataacaggtcctctcagcagtccagtcatggatgggggagggactctgtcccttgaatcatgggatctgaggactaatggactttgagaaagtaggctgattttaagttgtgtaagcactactgaacccaccagactccagtggagagtttgagtactaagaccacacagatggaactaatcaaacccaggggaatgcaaagaaaacaaagcacaggtgtgagagagtggcagggaagaagggacagcacaggacatggaaggagattggggggggggggggcgggaagaatgcattatatatgtctataaaattaaaaagaacacatcttatttaaaaaggcagacaataccatctcaggatagtaagtagacagtggccagtctgcagtacaagcacctcttctcattgtgctcctgggtcctgcatgatcacagggatgccagcaccaagacacatcctggagattcagagatgcacaggctatggagagaaagagactgctgggccactgtggcaaatggcaggactcagaacccaaggggaagaagtgaatgcttggcggcaagatcagattgcccaagactgggccagggtaaaaccctggggttagcattagcaagcaagattccttgactctgtcattcaaaggcatgaccagagatcaaacctaggtcacaggagatacaaaaatgtttaaaataagtaagtaaaaaagaagaaaacagtgtttggaagggtaagagaaatatgctgagacatgattgttttaaaacaattcagaggtctggcatgcacaagttccttccccagcactacaacaaaacagaagcctacctgtcattccagaagaccagagagagcacagccacacagagagatgctgtcgtaggacacaaacagcagcagcaaaccactataaaccccaggttctaaggcagcagtctagacagcagaagctcccagagagaccagtctacagcacacttcaccatttgcctccatagccagctgcttggaccgtgaatgaagtattatcccataaaactggaaacattttctagggagagaaaaatccacagagcaatagatggacatggaaaaacacagaagctatggggcgggagctggcatcagcagctgagaacctcagttcagatccatagagccattgccccagagcaatcaaagaaatcagcaggctcatgtggtacaggtagacagtcaactccctgtaagtgtcttggaatactgctctctggttctcttatgggggacatcatgaatgaaagacatttctttctcccacttttgagacttcccagagacggccttttcactgcttaataagactgcaggcatggcagagtgtggcacgtggtgagaaggtatgaagaaagggagcagacaggcaaacagatgggagaattcacttgtgcatcagagccgctcctgtcatgattagcccagcctggagtcagtagcattcatttatccgtgaatgttatgaggccccactctcatgacttcatacagcatgtcaccacagcagcttgatttcaacatgacctccaaagtgtaccaggaagtaatttgcatggaatgagaatctcctttctaggaaaagtgagaaatgagtataagcgctaaaaataaaccaaatgccacaactcggagtacaatattatttgaccttgaaaaggaataaataaagcttagaacccttaatctgctgggtgtggtgctatatacttgtaatcccagcacgtgggaggtagaaggcggaagaattgagagttcatggccagcctgtgctatatgagacccttctagaagaaaggaaaccatcagtgtaaaaaagaagctgctcacagaaagaaaaccacagagactgaggcagagccgcagagccagagaatacagggtcagggctaaagggaccgaggatggggagtggcaggaagatgacaacagaagagaagttgctgtgtttactctgaccctgacatcacacaacacacaagtcagcagcgtcacggagtaccacagacaccttcaccttaggtgtcagtcagagttgcaaaagaaaagtgtgcatcatgtaccaataaagctcttgttactggctgcctccctccctcccccttccctccctgtcgctttccctcctccccctctcttggctagtaccctttctctcacttgccactcccccttctctctaccatggtgacttctctggcctcagtccttggggccagtgaactgcctgcccaacagtggcttcccaataaacctgcatttaatataaataaatgagttcttgttgctgcaaacagggctttgctccaagtggtcactggaaagttgctgtttcctggggctgcaggtgcagcttgatagagcccttccctccttttgtgttctcagaacaaagattcactcgcccctgagctgaggcagtgggtccagctggttgtctggtcctgtggagaccatcttcctactgcatctagactggctgttgctgaagtcctcacaagcaccgcacccctgttcctcaccagtccccagcccattctcggtaagtgtgctaatcgaggcccccgcacccaactcagcaaacagaggaagagacacacattccaggctaaaagaaggggtgcttagctgggtgctggtggtgcatatctttaatcccagcactcaggaggcagaggtaagaagatctatgagtttgaagccagcctggtctaagagcaagttccaggatagccagagctacacagggctaaaaccttatcttgagggggcagggaatgatgtcatatgtgatgcctttacatgtttccagggtgttttctctgcatggtttatattatgagtatttcttaacaatggctgcttttcttctttttcttctgtcttatcacccaagccattctacatacattttatcagagcacccatgaactttgcagtctttcctatctgtaaatctgacccttttggtagtccattactaaaacccatcatttgagacagtgtcactatgtagcccaggagaaccttgaacttgagatattcctcctgtttcagcctcctgagtactgggattctcagtggacaccaacatgctcatgagtgggttccttacgtctcaggctagacctacacacccttaacatggctcactaggccctttctgtttcatccctggcctaccctactgcctcatcatctgctgtttgtcctcagtagggaccagctctccataaacaacccctgcatgattgacttgtttgcctttcaaaactccacctcttccaggaagccagaaaggacttccttaaaagacgccaggaagtactttccagtagtctctgtggtgctaaggctgacttgaggcttctgtctgatgtccctgctgggctgctgggtcccctcactactgaacttagcttgaaatcagtcatgggatagaaagggcactgcttcagtcagggttgtgcagctctcagctgacttctgaactgggttcctccctcctcgctctcactcccatacctagagagcagtaactaggaaaagcttcacaccagcaatactgaggagagaggaaagccttggaggatgaagagcacaggggtacttgcgtaacttttgtattgtgctgctttggagcttgttttgatttataaacatagttaatggaaaaccaggagcacagagccagctccatacagaccctgccctcttctgcatgtggacttactatgaggagctcactcccatcgctagtcactgtcggtctcgctctgcttcgtccacgcttgccctcaagaatcaggtagggccagccccaaggagccgaggaaagaattgtttttaggtgttgacactgaagtggaagcatgaacctatgaaggtccttgtgatcaggtccacggagtgcctggtgcagcctttgtcatccgcaaccgtcctgttacaacttaactgctgaaccgagagcaataggagaaaggctaacaagctttggttagggcaggcacggtgggtggtccatgcctgcacctcgagctgcttgaaagagcaaagccagcctagacaacgtggtggtaaaacttctctctcagaggcagctcgttctcctcttgggtcaagcattctcaggaagggcaataccatcttgcagcacattttcctgaacaactggttgctctgacactcaagtaaaatgtgtgtaaaatgacctgaaattgttgtgtggaattgagtcttgttcgtgttagctgctggtcctggggatgccatggtcagcaaaggccagtggcccacatacacatgaagaactgcaaccagccaggttgaagtggactgaacagagcaactttaggggttcaaaggcccttctttgtaagacaaaactcaagatggattccttggtgtcacatgcctgaagttacagcctttgggaagtatgagcaggaggattttagtagttcaaggccatctaaggctaggagcaaatctgaggccagcctggacggctagtaacccagtctcaaaagttaaaaaataaaagtgtaccgtctctaaggaggagtagaggctaaagcctgctctgcgaggagggagagagctactccaggtggcactgatggggggaggggagccactcagaccattgcctttacaggcatgggtggtattttgtcactgcctgttgcctctctctctctctgttcctgaaatatgtccctgtagcccgttcccatgtcttcctgcagccactgggcttgactctgacctctcattaatctacattctagatgtcttacccttggtgctgctcggagcaccttctgcccttccatctgtccatagcagcactacatggtaacctgcagatttaatgctaagagccaacagtggcagaaatgggccccagagacatgaaactaagggtggccccttttccatgtgtcttccccacttgtgattcttgtccccaaacacattgacactttgctttccagaattggtaagttctcacagtctcttaaatcagcattaaactcgtttctgcaaagtgcaaagcacatgttgttttgttttgtttgtttgtttgttttgagacaaggtctcgccatataactcaagccggccttgaattcactgcatagccaaggctgggattactagttagtgcccccagccttcagttgttttttctccctgacacagggtctcattatatagccctggctatcctggaactctatatgtagacctctggccttgatctcacagacatctacctgttttctaagtgctgagattcaagacatgagaaacattctcactgcgtaaatcatgactctggagagagcccagagccttataggccgtcagcccctctgcagtgcccagtgcaggctggtcgactacagaggcttccctcctccctccccagcagggtcctttctgtttgttctgatcctcaggtcttcttgtcttacaataacaccctacatcccaaaaagaatgtctgtcgcttcttcatgaatgtctccccacacatgagcctggagcagcgtcactgcatgcttggtggtggtactgcagatgacatgaattcattccctctggtttcttcacagaactgcagggcacactttctctctggaggtgtgttcttacccttctgcagagtgaggagcaaaccgtcagagaggcagccacagaaatcgtgacaacagccatgtcacaaggaaacacttgccagtcaacaggtactttgttcttcaccttgtatcatattccttattgctccataaccaggactggcaaacttaccagaagatgccatataatggatataagttttgcctaaccatttagccttttcctcatccttaccattgtcatgggaaacagccctgaaaagccacaaggcattgtgatgctataggacaaagtattctttagcactagaaataggaggaaaggataggactgttacagtcggtgggaccaagatgaagtgcccaggctttagcttgatctttccacagcagttcaactgttgggagccctcctccttcacacagtgccattgacaccaagcacttactctactccctcaccatagcaccttctcctgccccacacatagctgccttctgtggagatttgtagtaggaactggtgattctggaaggcccaaaagaaatttaactcagggtactggtaaagatggtttagtggttacgagcaccaactcttccagaggacatgggtttgattcccagctaaacagtcatacacgagagagagagagagagagagagagagagagagagagagagagagagagagagagaaggaagaagaagaagaagaaggaggaggaggaggaggaggaggaggaagaggaagagagagagaaggaaggaagaaagaaagaaagaaagaaagaaagaaagaaagaaagaaagaaagaaagaaagaagtatgaatgagtatgtgttctcactctgtagcccagaccagcctggaattcctccacagcccaggctgatgacaaacttggtaatcctgctccagtctcccagttgctgtgcagagtaggatttttgtctttgttcactgctctaatttttagaacctggcatccactaagcatcagtgtgtaatgacttgaatgagtgaataataaggacttggggttttcaacaactgaccgtgtgtgggagagacggaggtaaagtcctctggattctaaactgttaagaaattgccctatggagctctgtgagttcgagaccagcaggtctacatagggaattctagaacagccagggctaggaagaaagaaagttggagctggagagatggctcaagtggttaacagcaccggctgctcttcctgaggttaagagttcaattcccagcaaccacatgatggttcacaaccatctgtaatggggtttgatgcccccttctggtgtgtctgaagtggtggctacagtgtactcacacacataaaataaatctgagggagagggagagagaccttaaagtgggagatccgagttctagcagatcatgtaagctgcattaggcctactgcttcctagaaatcctaatttgataagaaactgcgtgtgcatctgcgcagtccctacctctgacagacctaggtttaattgctctctcccttgtcattccctcctttctcaagcaggatggatttttttttcctttaagatttgttagcagcggcggtgcacgcctttaatcccagccctcgtaagacagaggcagacagatctctaagtttgaggccagcgtagtctacggagagagttccaggacagccagggagggctacatagagaaccctatcttaaaaaatgaaaaaaggtttatttatgaggatgaagagaacactcactggttgctcgtctagagatccatcattcagcttccagcacccccatggtggctcaaactgtctacaggtccagttccagaggatctggacaccatcttctgccctctgagagtactgcacacacatggtgcacaaacatatatgcaggcaaaacacccatataaataagaataaaatttaaaaattaaagttaatatttatttataaataaataatatcctgtgcaaaaacagccagtgcttttaactactaagccctctctccagccccccagggtggaggttcattcatgcctgccaccctggggaggcggagcttagggactaaggacacatcctcctggggactgcaatggtctaggactgcgtgacagcacaggggacagtggagattttctcaactgtcatggtggttttttttttctttgttttgggcttttttgagatgtttctcttgtagtccaggttggcttcaggttctctgtgtagcccaggatgaagtcctgatcctctgccttccactttcacaatgctaggattatagtatgtgccgacataaccaaactccactagcatgtttgatagaagacactgaagttgttgctgagaaagtagattgggggccatagagccgaggcaaatgagagttatggtagggtggtgtcccttcctggaagagcagatggtcctgcaccaaaggctgctgtgttcctgccctctgggtcccttcttagagggaggggatcacatagggctggaggagtcccagcctgtgatctacagctagggctctaagagcacaggcaggtaaatggccctgaatcccactgttagtgggagggcaggtctgaaacagggccctcattgagcccaggaaagcatttcactcaccttccagacaccttaattctcatggaggaagtgacagaaatgtaagtatgacctcaaagaccagtgtagactcctgggacaaatgagccgagccacaagaagaatgctgcctggaagagagtttggtgggactccagaagcactggaaggacagtgttctatgaagccagtatctcctccatataaccaccccaaggccagctctgcgcctgctccattgccctcgggtgttcttttctattgtcagaaagatcagaattgtgatctgccagggaaggaatggtttctgtttcctcattcatttcttcaagtcacagacatcttgtcaaggtagacaaaagtctctaccccttccacaatcccctctaggggattgtcacagtgaagctccaatgaccacataccactttgcccttgctagctgtcactgttcccagggagcctcgtcccctgacatctacctgcactcagccagtgctgtacagaaaccaatgcaagctaatgttcacatctaagtctaggagtgggttgcagggcccacaagtactctagctgagccttgttgctggggtggtgatactgtcttcatggtctcccagtgactatgccccaaacagacaacaagaagcccnnnnnnnnnnnnnnnnnnnnagagccattttgaatcattttgcctccactgatcctcactggcccccaggtgactgacttctgtgggtggttgtcttagttagggttttactgctgtgaacagacaccatgaccaaggcaagtcttataaaaacaacatttaattggggctggcttacaggttcagaggttcagtccattatcatcaaggtgggagcatggcagtatccaggcaggcatggtgcaggcagagcgagagttctacgtcttcatccaaaggctgctagtggaagactgacttccaggcaagtagggtgaggatcttatacccacacccacagtgacacacccattccaaccaggtcacacctattccaaaaaggccacaccttcagatggtaccactccctggtccaaggatatacaaaccatcacagtggtgataagcccttggtctagggcctaggccatctggtgctgatgcagcaggcagggtctccctgtccctcttagcaaaaggtagctgtgcctgatgactactccttctcatggctcagccctctttcctggcttcccttctatgtggaagcctccacttgcaatgctagggctacataggatgcagcatttctcagttcactagggaaagcaccttttgcatgtgtgttcgtctgtttgcaggtatgggactgtccacagttctttttgagacagtctttcactggcagcatgggagcacggggcttacttgattgatccagactggccactgagccccaagggtctgtctctccctaagccccaatgccacgattacagggatgtgagttctgtggctcaaactgagatcctcgtgttcgttctcgtgacaagcactttgctggctgagccatttcccaagccatcctatttgaccctaagctgcatgagaaaagtaaaggcgctaggctttggttagatgactgcggaaggagtttactggtgagcaactctccctcagttcctactcaaggcctgtacattccatggagcactggtgagtggctgggggtgtgagggtgtgtctgtctgtctgtctgtctgtctgtctgtctcattggcccctagttcatccagccccagacatcttctaccaatacaaacaatacaagttgtcaaatccatgctgttgtgacactatatagcctgaagggtaggtctgcataggccactaatgaagccccttgttctaccactgtccaagtaagagtataggggctgtctgagacctgggaaaccctcatccttcccataacatcttctgaatcctgttctgagagctcctgtttggagtaggctagcctaggctttcttgttccacatgacaggagctcttcaaagcagaacagaatggaaagtggctgttactgtgtttgctgcaaagaggaattttacctgggcccatgctgggagactgtgtgtgcaatcagacagagtgctgtgttgtaaatctaatgcctctcagggtttctaaaaagagcacaggacagcagttgggcacgtctttatgtgtgacactggaaaagaccgtatcctaggagctgtgctttggccagctctctgaggcaacaagtgtccagtgtgtctaaagggcagggaatcttcagtgagtatactgacagagcttgtcaaaatgaacgggtgtggtggcacatgactttaatcccagtacttgggaggtggaaataggcagatctttgaattccaggccagctacatggtgagaccctgcctttaaaagaaacaaaatgaagcttgtcttgaggaccaaaggcagagaacaggaggtgagaatccaaagctgacctcgacactgccttctcttctcctttgatcttgccccccacacacacacacacctctagcaggagtacccacagtaccagagtgtagggcatgtgtggacagggattccagcttcaagcatgaaacaaaccactagtgtctgcagcatggagaccacgtttgtagttgcttaaacaagtcagtagcttttctccctaactcagaatacccagcaggcttgtgtggtggccctgtcatcaagggacccacaccttatttcccactgctctacatttgcagttgtactgtccctcttgtcttctaagacggtaggtccagcctcactcccatgtgcactgtctagtgacaggaggaagggaaggccactgtaggtgctgcatctccttcaacatcaaccttagcagccaggagctgctcgtggtctgcagctctcacaagaggcccaggactgttgatttgagccaagtagcaacatgctcagctaagacgttccccgtctacatggtaggggatgggcatggaagagagatgcatacttcccacttccatcctctagttctgacatgctctaatactgcagagggctagctgcattcacactggcagctgggggctcannnnnnnnnnnnnnnnnnnntgtgtgtgcaatcagacagagtgctgtgttgtaaatctaatgcctctcagggtctctaaaaagagcacaggacagcagttgggcacgtctttatgtgtgacactggagaagaccgtatcctaggagctgtgctttggccagctctctgaggcaacaagtgtcctcattgagctcaggaaagcatgacagggattccagcttcaagcatgaaacaaaccactagtgtctgcagcatggagaccacgtttgtagttgcttaaacaagtcagtagcttttctccctaactcagaatacccaggaggcttgtgtggtggccctgtcatcaagggacccacaccttatttcccactgctctacatttgcagttgtactgtccctcttgtcttctaagacggtaggtccagcctcactcccatgtgcactgtctagtgacaggaggaagggaaggccactgtaggtgctgcatctcctccaatatcaaccttagcagccaggagctgctcgtggtctgcagctctcacaagaggcccaggactgttgatttgagccaagtagcaacatgctcagctaagacgttccccgtctacatggtaggggatgggcatggaagagagatgcatacttcccacttccatcctctagttctgacatgctctaatactgcagagggctagctgcattcacactggcagctgggggctcacatttgaatggtactgagcccctggccttggttatttagaaccctgctcatcattcccagacagattttacctcgcttgcatccatgttgcttttatcatcgcaactcacagagccaagtatacgagaaaagatggatgaattgtctctgtcctcataaatgagaatatgggccagatggtagtgacacacacatttaatcccagtacttgagaggcagaggcaggtggatatctgtgagtttgaggccagcttggtttatagagcgagttctaggatagccagggctacacagaaatcctgtctcaaaattaaaaaaataaaataaaatcaagtgaatgtggatccgtgtgacattttagccccatccattgcctgaaatgtaaaggcttacttagaagacaagcacacacaccttgcaattacaatcaccatatcgttagaagtgatgggaagagaagtgactgggtgacagcacctagtagaggctaaagaataaagacatgcaggagggatatggcagagtgacactgtggaaagacccaagaatgggtagagtcccaggtccttttagagtcaccctgcctatacctacttcatgtctgtgggagtgttgtcatggcctgtgctaagtcagcccattagtcttaggttcctaaggcctagccagctccttggacctccttttccacatggccttttggacatcagaactcagacgactttggtcacacccaccttcttcagttctggtgtttgttggtcaggagtctcatcggctcacccacaccagaagctttttaaggatagagattttcaggatagagaatatcttgcatcagcaaggtagctgacaggttagcacctagagtggcttgcatcagactgtgacctggtttctgtagctctctttggttgtggaaaggcaggtggatctggacctcagggtggtgggctttcctgtgcagcctcccttgtgagccataatgagccttgcaggcttaggtcaggtcacactggtacttcagtcctgtcagaccagaaagtaagagtcctcagtgttataagcctttgccactaggccaccatgatgtaattcctctgacctctccagccagggaaatgatggggaggcctgtttgatagtccacactctactttatacttacaaaatgcacatagaaatcattggctctgcactcccagggctcaggatgtgtcatgtgcagtgtcgcccttaggctctgcctctagcccttcctcgcccttcaggagttataagtaagagactgagccaaacataagtaggcttctggccaaaaattggatttgactgagaaactagcaggaatatttttctggtggctcatctccttcctgtctaccctacctaccaacctagaagagatctaggaatcccctgaccttccaccgtggctacaagcagtcccagctttctttaacaggcctgtccataaatctcccttgtttctcatctttgaagaagccgctctgtcagggagttcttactcaagtgtgaggggagggaaaggccactagtttcagactgcaagttcttttcactccatttcacaatatccatttcccagaaaccacaggtttttgttttgggtttgtttggtttttttttttaaatgagtacccagtaggcaggatgcccaacgcacagcctgctagattcaaggccaaccacctggagagaaaaggagtcggtcacagggtttgcctgtggtggggctgcctctcaccacggaaaatagggacttaaactcccactatttgtagtttgcagtggtggacttagtgggttgggaggcttgaagagacaagaatgatatttgaaattcaaggcttagtttaggatataacgttctggtgagcatcttagttccctgctaagtcaactacaggaaagatgaaaggaggctaaaatggagcaggtaaaaagagaaaggaagccgagagactcagctaaagaatggtcttcatgatttctctgtttctgtcagtctcccccctgacccccaaccctgaccccctgcctccaaacaggtccttctttgtatttctaactgtcttagaacctgtgatgagaccaggctggccttgaactcacagacatctgactacctctgcctcccaagtactgggattaaaggcgtgcaccaccatggccagccagtctttctgtctcttgaggggtttgtgcatgtgatgactagagtttgatattgactgtcttcctcaatcatgccccaccttatttaaataaagatcccaaatcagttatactggctcacctcaagaaatctcttatcgtgtctcccagctctgggatttcaggtaaatggcactgtacccagatttttacctgggtcccagggagccaggctatgttctcatgcttgcatgtagcactttaccagttgaacagtattcccagagcccacatgctggcttactttctttctttttttttttttttttttttttttttaaaggatttatttattatatgtaagtacactgtagctatcttcagacactccagaagagggcatcagatcttgttacagatggttgtgagccaccatgtggttgctgggatttgaactccggaccttcggaagagcagtcgggtgctcttacccattgagccatctcaccagccccacatgctggctttccaacctctctgattggaaggaagaagacacagcatagagagtcttctcatgcggtagaaggaatgtgccaagaccctaaaaggatgccgtgggtttagtgtggtggagagtcatacgggatcaggtcaggagcatcttctgctacatagggaggttaaggtcagccttgtctcaaaaacaatggtaggagtgatcttaaaaaaataaatgttctacaaagtgtgtgtgtgtgtgtgtgtgtgtgtgtgtgtgtgtgtgtgtgtgtgtgtgtgtatgtgtgtgtgaagtgtacatggagatgagaaagggtatcagatcccttggactctaaggttagggggttggtttttgttattgaggattgaatctagggtcccctgtatccttgtcgacacctctaccgctgaactacatcccaggattccttttactttttattccgagacaagttctcattacagttgaactcactatgaagcagacaagctttaaaccagcagtccctctacctctgcttcttgaacatcttagattacaggcatggaccatcagatacagtttaggttttttaaaaggcaaaatctgatacagcatttggtaatcctgatatctgcatgtaatagacaagtcaaacaatgatttacagtgaggcagccagggctgactggcccccactctatcaggaggaacgcaaacattttctctttgccttactagcctggcgtgtcagatcccttaccaggttactgcttgggccaatatggctgttagaagcattaatcacgccagactcattgcacatgaggaggaggaatatcagagagcatgtacctttccctgtttaaggattctaccagagttctgtgacacatgtcacttacttcatcagcttccacttaatatcataaccatacgtaactacaaaggtgtgcaaagaactgggctgggcatattacctagagttaatctttctaaagggaacacatgcacacatgcaccattctgtccttttgatacaagagatgctccttaaatagcacagtctctgggaataaagagaagtgctgggcagtgggacacgcctttcatcccagccctccctcgggagggagacagatctcatccagcttggtctacagagcaagttccaggatagccaaggctacatagtgaaaccctgtctcagaaaaacaatggaaggaacgagggaaggagaaggggaagggaagggaaagggaaaaggaaagggaagggaaaggaaagggggaagggaaaggaaagggggaagggaaaagggaaagaagaaaggaaggaagggagagagagagagagagagagagagagagagagagagagagagagagaggtgcttaggactgttccgagtgagtagcagcaggaagaggttgtgttgcagatggtggaaatgcgctgctgatctcactgtctgcacagatcacaggctgatgcattgctctacaaagaaaacctttcacaggtctacagtgtggaaagaaagagagtaaggctgcagagatgaaagcccggtgggtaagctggtgttctaaaagacctgggttctagtccctgcacctatgtcaaggaaatctgatcccttctggcctcctctgatactaggaacacatctaatgcatacacacacatatatataagcaaaacacccacacacataaaacaaaataataaaataatgttttaaaggagaaagtaggtgtaggggagcaggtggctcagtggctcagcgttgcaaggccctagcagcagaagaaataaaaaggaaagagtaacatgagcaagcctcatagagaatacacacttgtaggataaagcacaccaacagctcagtttcagaattaagttgctcaattaagatggaagaatccctgtaagtacattataaagtatgaggtgtccctttataaatacctccaagagaagtctgactcgcaagagacaccgctgtggtttgtgaggtcctccatgttcaagggtccctggcaggcagagcttaaaagctgcaaggttacagggatcgccctgactcagcctgggcgttcagtagtcagagaattgctcaagggtggcctcagcaaactcacctgcagcgagcagctctaagagctctagtgtctctggagagcttgttactgctttgtcttcattcttattatgtttattttgtgtgtgcatatgcttgcgtatgtgcaagtgtgtaccaagacacactcagagagctctgaggataacctgacagcatctgttgtcctcttccacccgtgggtcccaccaaccaaactcaagttgtcagtccttgttttgctttttgttttaaaatgtatgtgttacaggtattttgcctgtatgtatttgagtttgctgcattgtatgcctagtccctgtagagccagaagcaatgttggatcccctggaactgaattatagacaggtatacactacagttgacaccttaaacagtcacaggacatttacaacatttatactgtaggtttcaattcacaaaattaggatcttctttcattaccttctgaggaaattgcaagcacactggaaatttaaagtaaacatacgaaaaggaagcacgtttagtggcagagtattgcctggggcacctgaagccccgggcccattccccagcacctaaaatcaataaagagcttaaatgtagtaaaataccattcagatatctaagaaagtctgctaaatataccattattccaacaacaaaagaaaatcaggggctggctcagcaagtacagtgtctgctgcttaagcctgagaatctggatttcagatcccaagaacccaaattctggccacagtggtgagacacatctgtagcctcagagctcatgccgtgaggtaggaaacagagacaagtggatctccataaattcatggcctgctagcctggcatggtggcagacaacaaggacacagtggaaggaaagatagcacccagtgatctctgacctccacacatggggcatgagccatggcacgcaagcatgcacacaaaaataaagactcctttgaggctcaaatagttgaaaacaccatcagtactaaactaggtgagcaggcacagtatgggagcctgtagtccctgattatgggaggttcaggttgaaaggttacctgtgcccaggagttcaaaaccaatctgggcaacatggtaggaccctatctccaacaacaaggtttaaatatgtgaagctcttcttagaggaaacacttgtaatatatgttatacagaatatacaaagatgtcatctttttaaaaaaaagtaaatgaaaatgatagaaaaagattcatcaagggattggggagatggctcagtcagtgtagcatgtttactgtgcaagcgtgagagcctgagttctgatccccagaactctgctaaaaagccaggagtgccagtgcccaccgataggcccagcactggaaaagtggagacagaagaatgccaggggctttcaggccaatcggtgagcaccaggctcattgagagactagagattctgcctcaggaaagatggtggaggaagctgtcaggatctcagcaggtgaaggtccttgccgctaagctcacctccctgagtttgatccttgagacacacagtgtaggagagcattcattcctgtaagttgtcctctaatgtccacacatgcacaacagcatgcacatgcatgcataaatacatacatacatgtgtatatgtataaataatagtaaaaaaaaaaatcaggtggagagcaatagaagacatctgacatcaacctctgcctctacacacacatacatcctctaagagaaagaccataaaaccaatctccttgtagaagtagatgtgaacagtacaaatgaaagaaaagaaccctgctttctccacagtaataataatgccaactaggacagcagcgctgtgccattccctgtatgttgataccgagtgaaaagattgcactctcccagatgcacggtcagacccagggggactgaaaatgctcacatttctagaggcatttcagtggtatttctggaaatttacagtgtataccaagtgagctgggactcaaacatttatgaatgtccctatagaaatagaattttagggctggtgagatggctcagtgtgtaagagcacccgactgctcttccgaaggtctggagttcaaatcccagcaaccacatggtggctcacaaccatctgtaacaagatctgacaccctcttctgaagtgtctgaagacagctacagtgtacttacatataataaataaataaatctttaaaaaaaaagaaatagaattttacacacatgtacaagggtatatctgagtttatgccttttaacagcgttttgtttagataatagcaactcaagtatacatcaaagaattacataaattgtaatcccttcatagaaggctgaaagtaaacatgatggagtggctattatgaactaacatgtcaaggcaccatgagatgctgctgctgctgctgctggggaaaggaacagagcatgctgggcatcatgctgcatgcctgtgagcctggcactcacaagtcagaggtctcaaatgaaggaggaggagccagtggggtagctcattgatttgccagcgagcttgacaagctgaatttgatcgcaggcccccacatggtagaaggacagaacagagtctcacaagtttcctgtgacttccacacacatgcatgtatcacatgtacacgccctcatacacacattcacatatgctcacaaaataaatgtaatttttttaatttaaaaaaagaaaatgaaagagttggaagtcaaaatccaaaatgattctagtttaagctctgataacagttatcagtgtgtattttgtgcgtgtagaaagctttactatacattcccatcccctctgcgtgaaggaacctagcaaagagtgcaaatggatggggtctgtagttgtcgaaggagtaaacagttggagccaattgtgaggtgtggtcttgccaggtttccctagccagcagccatgaatgaagactctctggactttgggattcttgcattcaccctatcaagtctctgttttagtctcaagccagcgtcttttgaccccttaacaaatttcagtggcccctgtcaccatcactgtgagtcctcagcaaagtgaacttgtcatgagcaattgaaggcagcctcctcgctttccttacctggtgagagcagcctagtcatgctgctcacaaagctctgaggtagccaagtgggacttaaactcctctctgaactctagaacttggggacagtgtttagttttagtgttgagggttctgttgcgctcccatcccttacttcctacctccatggagcatgttcctcagagtccagcaggaggccggtggagttaggttttagtttctggcgaggactggggatagaatactctcagctgaagagaagtctcagttctcaaagaccaagaggcaacaaagaggaccatggcaggaggtgtgtgatctgccctgccaccatcctgacttgatttctccacagcttagtaaaatgtcttagcaagatgctctactcactcataaacctcatcacctctgaccctcagtgtgagtactgcccggccgggtcactgtggcggtcactcagagtgttagggtctttcatgtattgtcagactgtgaataaaaatagaaacacacagttaaatttgaaaattgaactgtgagcaaccctgtgaagagcatgaccctgggttatttgggaattctgacagtgaacagtcaggactgatcgttacctaggattcaaatggagctcggtgtcctgtcctgtacccagcaccttctctctggaagcttccacagcagcagggagcattgtcagggtactgccaggccccacccctgacccccgccactccccccactcacctctctctttttttttttttttttggttttttgagacagggtttctctgtgtagccctggctgtcctagaactcactctgtagaccaggctggcctccaactcagatatccacctgcttctgcctcctgagtgctgggattaaagacgtgcgctaccacgcccggcctcacctctccttttttccctcattttgctctcactcccaattaaaatgtacatatgtgagtattgggtataattactagataaggttttgtgttaagggaatctaactttttgggagcatgctggctttttttttttttaataagtggccttcaattcatttttggccatttgagtcattgaccttcaccttgagcaggaaggaagactccatacccagggtgagcgcatgtgcagcccccagaacggatgccactgggaaggtgggagtgaatgagactgtaagggaggagagcagtgcccnnnnnnnnnnnnnnnnnnnnnnnnnnnnnnnnnnnnnnnnnnnnnnnnnnnnnnnnnnnnnnnnnnnnnnnnnnnnnnnnnnnnnnnnnnnnnnnnnnnnnnnnnnnnnnnnnnnnnnnnnnnnnnnnnnnnnnnnnnnnnnnnnnnnnnnnnnnnnnnnnnnnnnnnnnnnnnnnnnnnnnnnnnnnnnnnnnnnnnnnnnnnnnnnnnnnnnnnnnnnnnnnnnnnnnnnnnnnnnnnnccccctcccccagagaagtgcttcccatctggaaaggagagttttgcagagtggtgctgtcttggagaggacactgacctgcagtcagaagtcacttcccttctgacttagttggcatcattctgtggtgtcagtttcagcatctataagatggggtggtttcatatctcacggaacatctgcattaaaacacaaatacaaaacaagcattaaaagataaacagggttccatctccaatccaaatgctagatagtatctgttaatgctgaaagatagaaagcttttctatttgtttttaaactcctgtttatttgctaaattggaggtccttagcacatgatgggcatctctttttctctgttgtggatttagggacttctggatgctgttcttgtctctttcaggctgaagactaggtctgccctacagttcttgctatatttcagaagtgacttgatatttgtgatgacaccaaggtgtctttttactctaacggaggcactggggtgaactgagtgccattcctgccaaacagccttattacccagagaatctgacagcagttctcttgcctttgatggcaatgaaatgaccacctgactccgaagcccaaggctttctgctgaaccgagtcttacacagctggttagtgctccacttcactggaaacagagtgaggttgagtacccacggtgcctactgtgtgtgggaatccaaaggtgagaggcacagcatttcagctcccatactgggctcatctggacatcctcttgattccagggtctcagtgtggcagagctttctcttggtggtcaaggtctaactgagagaagcttttgttccttacacttagcacttaggtttagccctgactcacacacctccaaagtgccagcatgagcaacagccacacctgtgaagattcatgttgggggcagaaggcagattgggatcaaagcctcctgtaacacaagaatttctcagcagctgtagtcccttaataattatggtttggagctttgccaggaagcaaaaccatttggcatgccatatttaacagtgagcactgttcagtattcatcatggtcctgtgcagagcaaataggcacctcaaacaaaggtaggatatttatgtgtgtataaaataacctgcacctacatcaaacctaaacatgttttcagagaggaatgtggcacttcccgctgcacagtgcctactttatgagtgagtgggagaaaggtcacgggctctgctccttctccttcctcgctggccttagtggttgtagtaatagcagttgctgtagtagcagcagtagtaggtttttgtttagaaaatttaccaccattctaggcaaagcagtgtgctaactgcagaaatcttttgtggcgtattgctgttgacatgggaagccagaattagtgagaggatggggagagcaaggccaggccagggactgaggaagaggagcgtgtgctggaagccctggtctctggagcagtggaacctgggatcctggtctgtatagaattttctggacaaacgtttgtcatttgaggaaggcagagaacaggggctcttgagaggagaggatgttagagctgcacctgaatagatgagcagaaggctggttgatcacattttgttggtacaccagagaatagagagagcaaactggaagtggggcaagcctggccctgtgaggttccagtaaggcttcttgtcctagaagttctataatctccccatgcagcaccaccaacaggacaccaagtgttagagtgcacactcctacggaggtcatgtggactctaagcctctgttcccataaaccaaaacaaactcccttctggtgttatgtcacagcaacaggaaagtatggcaggtgctggccccagagaactcgattgtggctgtgaagaacctgaccgtggttttgttttgttttgttttagagggatgggtaaggttttggaactgtagactagaaaagcaatgaaagctgtcttaagaggccaatctagtagtagtgctgagagtgatgcagaggcccagctgataagattttagaagcgatcgggtccttattctcaactagactagtggcaaagaatctggttgctttctgcccatgtactaagaacttacttggacaagatttaaatgtaatgggctaatttccttgatgcagggaaatttcaggatgggaaatttcaacgttataatgttgagtcagtggtgtgcctatcactgatggctcttaacacaggtgggacgggaggaaatgcaaaatacagtcagtatgcagagggaaagcacgggagcataaaggcacagaaaacctgctgaacaactgcctgtaattgctcacattaggtaagaggatgccttcctactgtattggaacaataagaaaggttccccaagggcaagactccagccagcattcaacttataatagaatccaagtggttttctgcttttacaaaatgcctgtatacacactaccttactcgtgtgattggaggaggtgaagggtcatcccgagaggctagctggacagtggtgtcagtgatgtccatgtggtactgtctttccctgtgtgtctttccctgcgaggccatgagaggacactgataatgctataaaggtgaagcctgggttaagatgccagaactctgagacatgtgctaaggagagctacatatggggatgggaccagcccaagagaaaaatatatgttccgggcagcaaaggtcgagaggtgaagccatctagcccctttgaaactaaagcctcagataccagacatggagctgcaaattttggtgtctaccctgctgggccccatttcctcccttttcaaacaggaatgtatattctgtaccattctatgtttggattacataagttgtactttagttttactgtggttagagtcaagaaattatcttgaaacttaagagagactttgaactttaaaatagtattgaagctgtgaaaggctttggggacttttaaagttgggctaaaataattttgcattatgagatggtctcaagcctgtaggagcaagaagccaaatatggtggtgtgaataaatttataaatttaaatatttctccaccataggctcctgcatggtcccagtcagcagtgctgtttgggaaagttatagagcttgtagaacaggaagtgtcactggtgtgggcttgcccctatgggatagcctcatcccactgccacttacttccctctctgtttcctggtgtaccagcaaaatatgatccaccagcctcctgttctggccacctgctgccatgccctactgttgtggacctgaagcctttgggtccataaataaaaacaacccagcaaccacagtagctctgattctgggagcatagaatccagacagcgtaatgatcactaggagcacagagacaccacagtggtcaccggaaacacgggaagtggaggaagagaatattggagttgagggggtgaaggatggtgagagccaatgccagcagggacatctttctggatgttaaagacactgatgtgtctgtctaaacctacagaggtctgctgatcagggtctcaagtcgagtttagggcacattgcaaagggagaggggttatctgaagatggccaaaggagaatgccagggtgtccaaatcagaggccaagagaagaagatatagccccaactagaaagttaagagtatactggcttctgccaggaggaagaggggacacagaaaagatggtaaaagtaatgggtgtgtctcagtagagcagattctgattgagaactgtttttataatggcttcccctccccgcagagctcagaccctgggcctcacactgtgaatgcctcattcctgagccctctgcagctgtgtaatagtcgcctttaagactgctggttcctaggcctggggacattctgaaagcagagtgaactaggaagtagaaaggcagtttaccagtggactccagagaatgccaaagagggaggttccctgccctcactcattcagtgtaggctggcccaggactctagctgaactgaaacatgcagctccccagaacctgcaccacgtctctgcgaagcgtgcagttctgcggtgttcaggttaaggctactgaacagctgagcggacagaggaagaacccaaaggcttgagatcaacagcagcaaatggctctaagggagaggaaacaagccggcttcaaggctgcctcccttcaggaatgccccctcttatgattgtgtggacattttgtgtgtgatgtcaggttagccatgcagctgattgcagctgggaaagtccttgctttagtcctgactgggaggaggtacagaaagcagctttgcttccgtgctgtatcgaccaccctcctgggctcacacaagctctagttcttctacccctagactttgttcttttctgagcccgggccctggaaatgaggagggttagcttctcccccgccccactttccccaagtttcttttcttttcttttcttttcttttttttttttttttctttttggttgttctgagatagaatctagagcatcatgcctgctaagcagacccttcctctaaattctccatgcaggctactgtctttcagccccttatctataccactcagatttagggacagtgtcctaggaacagtgttcactaaacaggctctttctttctttctttctttctttctttctttctttctttcttccttccttccttccttccttccttccttccttcctttctttctttctttctctttagatttttttatttatgttagtacactgccttcattgtcttcagacacaccagaagaggacatcagatctcattacagatggttgtgagccaccatgtggttgctgggaattgaactcaggacctctggaagagcagtcagtgctcttaacctctgagccatctctccagccccaaacaggcactttcttaagcacccattttccttgaatgtctcagggcacagactttaattgtcaagaggcctcttttctggtcatgctccctgcgatattttcttaaagctcctttctttgtttgagatgtaaattatataatgtaaaattataaagattttaggggctagagagatagatgtctcagcaattaagaatacttgtcctgtcagaggacccaagtcagttaccagcatcctcatggtgacttacaaccatctgaaattacagatccacaggaaccaacacataaggtgctcagatggtacatgtacatgcaggcaaaacactcatacatataaaataaagaataaatctggagctagagagatggctaaagggttaagagtgctggctgctagctgggcaatggtggtgcccgtctttaatcccagcacttgggaagcagaggcaggcggatttctgagttcgaggccagcctggtctacagagtgagttccaggacagccagggctacacagagaaaccctgcctcgggggaaaaaaaaaaaaaaaaaaaaagagtgctggctgctgttccagaggtcctgagttcaattcctagcaactacatggtggctcacaaccatctgtaatgggatctgatttcctctttgggtgtgtctgaagacagatcactcatatacatataaataaataatttaaaaataataaattaggcctggcatggtggtgcacgcctttaatcccagcacttgggaggcagaggcaggcagatttctgattcgaggctattcagggctacagagtaagttctaggacagccagggctacacagaaaaaccctgtctcgaaaaaccaaaattaattaattaattaatcaaatctaaaatatgattttccttaaacattttttaagttgtctttattattgagggtggagcgtacccttccatagcctgcatgtggagtggagaggacaacccttatgtgggatctagagatcaaagtcggattgtcaagcttaaggcaagtatctctatccactgagctgtctcaccagcccaaaattaaccaattgagaatgcacaggtgggtgacatctcgtatattctacagtcatcactgctgtctgattgcagaacatttccttcactcttgccattgagcaagccctgaaggccagcagtgcttcctgttcccgtgagtctgccttctctagacacttcatatagctgaccgtaaaatatgccttgcgcttggctttattcatagtgctcatataaggcatacccattttgtagcctgaatcaagcactttctttttgggtctaagtgatattccactgtatagctctgccatattttgtttatatattcatctgttaatgaatggacattgggttgttaagagtgtttttttttgattgtttctgtacacattgttaagtcccaggtctctgggtatgtacttgagagtagagtttcaggtcatatggcagttttatgttttaattactacacgatactaaacccatccttaaaacagggtatgatttaaagtacacccataataccaggtcttaagcagctaaggccagaacatcaagcagtaagccttgagaacactgagttaggtctcagtcaaggtggaaggaaagaagtgcaaactatcccctgactaatacacaacagcgccaccgcaccacgcccacatgtacatatgtgcatgcaccctgagccttttggcccttctttctgctcagctggcctcactgttgccctccactggtatttctttcatgccctgttccttacttctcttccctctcttatgacttcttcaagctcagctccccatttccagcagcatagggccatgtcagcaaatagacaccaggccttaaggaggaagactattttcaggacagctgccaagaataggggtaacatgggacagataagggtattaagaaggggtttgagcaaaaattcagtttcaagatagaaaattcctagggcagagactgcggctttgtggtgggtcacttggccagcatctacaagttccgtctcaaactaggatcagtgattcccagagactgaatcataggtacttaacatttcaaaccgtgtttcctaaccctgattttattacatttatttccagtgtgtgaatatgtgtgtgcctgtgtgacagtcatggaggctagagaggctttgcaaattcttaaaggacatttagtcttaagagctcagactgagaagaaacgccttgtaatcgagcaggccacctgtgaaatcagcaaggaacactgaggtgaagaagcatctcaatggatctgttgagtgagggatgtagactgtgtgtgaagagccactgcgctctgacctggccaaggaagaggcagccagtgaaaagggagcccaggtcttcctggtaccccacgggcttcccggtgtgtaggcattaatttgtcctcttggctcatggggttggggtcagattgccattccagggaaatcacttttgggaagaatataataataacacaagccatctaccatcctcagagctgcaggcatgggacccttgggtactcaacagaaggacgccaccaagaagcagggctagtgaccagaggctacataggtgctggtcacctgaaggaggggctgaactgattcaagccagcgcactgccatgtgtaggacactaagtgtaggcccaagtattctgagatgggttcagccctctgcttaccagggccatctctccaacccagctgcatccatttgttcacattgagaggcactctgggggcagaggcaggtggatctctgagttcaggaccatcctgttgtacatggcaagttccaggtcacacagggcaacacagtgaaatcccatctcaaaaataaagaatgaaattaaataagaataaataaaattgaaggggaaattcacttactcagatgtttgaaatggttttgtcttttctaagttattgtaatttcaccgtgtaaagggttttcagggagctagagatgagactcagtggttaaaagcaggtgcggcttttccagaggactggagttcagatcccagcatgttgggcccctcacagctaactgcctacaacttaaactccaagagatccaacgccctgttctggccaccacgggcacacatgcatgtacacacacacaaacacactcacacttacttatgcacatacacattcacacacctatacataaataataaaagtcgatctctttaaaaatcataaaatgaaattaaaggaactagacattataagctacacttgtaatcccaacactatagagatggagacagaaaaatcatgagactgaggccattttatgggtttgaggccagcctaggctacagtgaggtcctgtcttaaaaacaaacaaacaaaacaaaacagaagaaaagagagggaggggttgctagggcagttgttttctattatagattaaaaacaaaaccattcccactgggcagccaaatatgtaatgccaggtcagcacatttatgcaggtcacactagaaagaagggactgtgggaacttttgggaacctaggccatttgtgtcatttaaaaaaacagaaaatgaagcaaaatccaaagtgtaatatttgaaaggtttttgtaccaagtattttttaaataccaaaataatagcagtgtgagatcccttcagacctggaaacgtatttccacctctgggcaatgtgtaataactccacctctgggcaatgtgtaataactcttacagacagctgttcaggggggatggctgcttatgacctattcttcccctctctccaaaggatgtaaagggcatgtcctaaggggtgccttctagaaaaggggtaaacctctccatatctgccagggacccaacccgtcattcattactggggaccctagagacagtttgtctgtccatttgctatactaagataaacattagtaaaagtgttggatgagattgtgggtgggggttaaggtcttacactgggccctactgaaactgatggtgcctggcatgtgccttcagaacgttaacagcatccctaactctctggccccatcacatgccaacagcgcatgcgccctcctgactgacaggcagatctcctccccagatagaccgtccctcagacaggaggctgggaccaggaagagctggtgtagggaggacagagccagtgccgagccactcccagcccttgacgagtcatggagaagggctcaggcaagaggtcctcccagcttctcctcttcctcccctccaacattccagggtctgtttcccagtgaacgcatccagctggaagcccagcggctaggagacctctgtaatggggtcatagagatcaagatccccagacatcagccagggcaaaaggcaaaacaaattcaagggcaagcagcaaagcactgactggttgtagacagctcagctcagctcagtgatccagagcctgggctgcagagccaggctccctgttacccactgcctgtgcagtcttgatctatgtactccaaatgtcaacaaccctgagtgtaaaatggtaaccacactgccatctacctcattcttgcagtctaggagttttcccattacagaaacaagcaaaacaagtaggttgtctacataagactgtaaccccatagtaatggctggtatctgttagagactgtcttagtcagggtttctattcctgcacaaacatcatgaccaagaagcagttggggaggaaagggtttattcagcttacacttccatattgctattcatcaccaaggaagtcaggactggaactcaagcaggtcaggaagcaggagctgatgcagaggccatggagggatattccttactggcttgcttcccctggcttgctcagcttgctctcttatagaactcaagactaccagcccagagatggtcccacccacaaggggcctttcccccttgatcactaattgagaaaatgccttacagctggatctcgtggaggcatttcctcaactgaagctcctttctctgtgataactccagctgtgtcaagttgacacaaaactagccagtacagagccccagtacacacaaacatgttttctccccatatatattatctatccacatctaaacagacagacataggtatctatctaagattgaacccagaccctactcggtacaagcacagctcccccatggagccacatctccagccctccccaggactgttgatggacagctcagggagttagagccatggggtaatcactgtcagggtcccgaggcaggtctgactaacagaagaggaagacgaaggtatagcagatgaagcagaccgaggggaagggaagggaggtgagaagaggactgtgactgaaggtctcggtggccacatctgtcaaggtgaggctgacgtggagcctgcaggtctcatcagagggtcatctagtcaaatgtccatatggacagggcaaaaaacagccctgtgaatagcagtgtaggagcaagaagtaaggtaagcagttctctgccacaaggcatggccagcgctcttccccagacaccagaccaatgtgtcagtcattttcctcaaactaagctattcaccctctgagaaagggcctgggcttttcctcgtgtctctcacagagcagctgatcagtgcacagctgtgaggaggaaatgacttagattggtgggtgatgggttgggaagagagagggggcggtaattaatgtgtgctaatgtgcagggcccccaaaaccctgaccagtcccctaaaactgacacaagttcccacagatgcctcaaacaagattctccagagctacagaaagaacaaactcaggctgtcaccactgaacagctctcagttgacctctcaggagggtgagaaagacagtcactgggccttagtctagacagcattcccctgggcagctcacaaccctggcactccagctccagggcacccagtgccctcctctggatctgcagcacatactctctcacacacactttctctgtgtgtgtgtctgtctctctctccctccctctgtgtgtgtatgtctgtctgtatctctccttgatccccactgccttgatccccataactttgtggtaagttttgaaatggaaaaaggagtttgtggattaaatccttagctttcgtttctgattttcaggatcccttgagtatgctagggtcacagcagactcctaaccacacttgttgcttggctttcttgtttgcttgatggacttgccagcctgagtgctaagtggaaatcccccttgctcttctctagcctccctttagaggcagcctgaccagcagagatctgactctgtccaagtttagcccagggccaagtagtcagctgggggagcaggagacccgcaccattactcccagcatcctaccgtcctggcatcctcccttgtggttgtgatcctctccaggttcatgtccagccaccccacacattcttcttgtgcctgtcattctcctaccccttcctaaggatgactcaggacacagggaagccattttgccatttgtcagtggaacagcctgtcctttctggtggcatgtctggtcacacccatgtgttctttactagacccaattgatgcgttatctaagctacaaacactgaatttactgatacgaggattttgtttaatggtgtgtagctctggctagcctggactcactatatagactaggctggccttgaactctggagctctgcttttctctgcctccaaaatgctgtgattaaagctatgcatctccatgcctgacctcccttctgcagagttttcagtccttgccgtaagatcaaggggggtaaggaaggactagagagagacagagagagggagagggaggaaaggaaggggaagaaggagaaagagaaggaggaggagagaaagaagaggaggaggatgaagaggaggaggaggaggaggaaaagaagggcagaaaagttagaagggtgcatttttctgagatctcaccatcagctagctgacctaatactgatcccataatacaggcttacacccgagccttttcaatgaggaaaagtagaaaggccagtgtgctgttcacctcagaagttcttccccccaccccccacccccgtggtgccatccttcagggaagccatatttagcactgcacttccaaggagcagccttgtgcctgctccagtgtcccagtgctggctgcagtgtgcagaacagaccacaaggctctgagagtggcagggtcaactctgtgctgcctaactgtcgcctccaagtaatgctaccatgctggacagtcactaacctgcttatctcactatttaaacaaaaaaacaaaaaacaaaagaccgtgcttctgcaagttcctgttgatctttgcttcagatgtaacatgaaactgtcggcaattctgtttcctcagagccccttggagttctgtgactgtacagtagtagcttcagctctgatatcctcatgtgtgaggcagaattagtaacatccagtccttagctgctgggggctgaggatacggcttggtggcacagaacttggctggcatgcataaggcctggcaccaccaaaaaaagcctagctcccttcagtagggctacaagtgccacaggccttccatagcccagctaaccactggggactggccttctagtccacatttcagccctttcctgagtgtgcagagcaggttcagctggttgtcagatggccaggaacattctctgggctgagctgaactggatttgggagataggagagttcagtagaagtactcgttagatggaggcagtagtgcagggggcttccacagagacccactctgagttgaaaaccttaagtcttcaggttccctcttgctgagatgagaaggcttaaaccaatggcaaaagtgtcaacgcccaaccctgctcaaaactccacttttagtccaggcagacaagtaagcaggggtcccccctcccaagatacctacttcctctttgtatacttgctctttcagcaccttaccctcagaaagcccggaagtcaagaggataaagaagggattcactatccatacaacagcaacagaatgtcagccaaatcctaggctaaggtcatagctcagtggtagagatcttgcctgacacataaaaatcaggaccaaaatgcagtgcacccctgcctttgcacagctgtgagatgtgtgaggctttacatctctaactgatgtgagagctgggatcagcccagctggtagggcgcttgcctagatgcttacccaagggcttcataaaactacacagacatggtgccacacatcgatctccccaatacttggtagacaaaagcagaggacatgagacatgcaaagtgatcattggctacaaaccaagcatagtggcacacggtatccctgtgcccaagaggtagaatcagagttcatagtcgtccttgccagcatccagtcggaagccagccagctacatgagaccctgtatttggggaggtggggggaggtgaaagggaaaaaatgtttttacatgtgaaatttgaatgaccgcatgtatagataacattttattggcacacagccaccatctctattgattgtctcagtaatgcttggctcgggatcatataaagcagaggtggtgcctctctgctctgagacgacatggactccctctccttccacttgtgctagagaggctgagagcggtgtctagtcctaccgttgctgctgctccgtaggacagggtggcggggttcaggctaagggctcgtactaacggtgtagaaagaagaacccaggatgggatcaagagccttccgcgaccagttctaccaccaccaccaccacccctgggatggtgacagggcttttagccaagacccttcatgttctcagattcctctacacttcttagggctggccctgagctacattcagtgactgtctccctcctgtctctacagaatttgccttctgccaggtggatgcctccattgctctgaccctggccttagctgttctgtgtgacttgctccagcagtgggaccagctggagccaggactgcctattctactgggatggctactggaagagggtgatgacctcgagggccacgtgcagagcccacatcaggtaatcccagttacttagggagctgggggcagacagagtgtcctagccctgaggtggagccctgagggcctaggaagtttctagatagtaaaaagtgtgtctctagctgctcccatgcagaggagagactgacgaggagaaacctcccaggtgaggctcacaggactgtggaggtccagaccagttaggaaggttcagacaagttaggaagggcactttgaaaaatgcaccttgaatattgagaataaaatcatgaaaaaatgcttatcagttgatcttagcatttcccaaggattagggtccttctagaaaatgtggcagggagtgtgtgtgtgtgccggcttcctgcctcttcctgaaaactgaagaccagcataggcaacctgtgttttccactgggaaaccagcagtctgtccccacatatgaccactagctagctccatatcctgagcagaccaagagtcagtgtataccaacccttcaaaacccagtctgtataagaaacaggaagatgatataacaaagtgttttagatgaaatgaccctaaacccccatagcattctagaaattttgtctcttttgtgctgctatcacacatgtcccagtaactctctgctctgctgtccagacttcctttgtgcctcctctgaattttctcggcacaccttaaaacctaagatttttctcagtacaccttaaaacctaagacccacttccgcaccaccagttccccaagtatcttggcttggagctaattcacatctttatcaaaggtcgtggtccggctgggagagaggtattgagtgaaagtagaaggtgaccttcagagcggcaagtgctgtggcacgggcgctgacagccccagtgggccctgtcaggaatagacacagctcccacatctagtgctgtgcctggctccacaggactcctcggagacttactctggctgtttgtcacttgatgtagggggaagaagagcatatctttgaaaaatcagaagtcaacttctgggctgagactctgaccttcgtgaaatccctgtgtaggcaactcttccatctcctctgtcaatctggctggcagtcccctcactcccagaagctctgtcacttgcaaaggatagcatcagagcagagtcacctcatctctcagctcttcagagaacttccactctcagctgagtttttgaagacagtggaatacacgaggctgcgcattcaggaggaaaggactttggctgtcctgaggctgttggcctgcctggaaggaaaggagggtctcagagccgaagactgccctagggaatggagacaagtaatggccccaagaacagaagcagcatgctgaagaaaggtggctgggcctcagctcaggtctgcaagacacatacatggtggacaccaattgaaactcttttcctcaggtgcctccccacttctgggagtctaggcttctgtcccttcctactgaggaccttgtctgcagcacactcattcaaggcaacccaattagttgcagctacctaggaagtgaagctgctgtctgcaggtttactgtctccaggtgcaagccacctgcaggcctgaactagtcagttctatcccaaagccagcgcccatttccccatacactgactgcattgaattcagtcttagcttacatgtctctctctctctccctctctctctctctctctctctctcacacacacacacacacacagtgctctttctctctctctcacacacacacacacacacagtgctcttttgtttggttttgtttagcaaatacctatttggtcatatttataaacttttnnnnnnnnnnnnnnnnnnnntatgtttgattctgggaatattaagaacctacaacatgcaaatacttgcattttactatctacctgcccaagtccttcagtggtccatattaagagtccccactgtcttacccagaaatgcctgcgaaggctaggaacccttgtcacccatcactggcctcagctattggacagagcctggggaaagggaagcctgagcaaatgcttaattcattcggtgccaccactgtacaccgtcctgtgattggtggagacagcagagtgccaagaaacacatttacccactttaggtgattccatatagaaaccggaagggtttgtcacttcaggcccagcccagctggcatcctcgaacaccagcaggtggcgctcttgcacacattatgctgctggtctagcgcttttagcctactcttttaaaactttttaaaactattatcagcacctgtacatgataggagggcacccatgccccagcatggatgtctgaggaagttgagggacaactttatagagccagctctctcctcccgcctctgcatgggcttcagagatcgactcaggctcaggcttgcagagcacgcacgtttatccactgagccgcatcatgtggcccagcttaccatgctacgtgtgcttccagagtacgtgacacccgcagacgcttgccttcaattcacggcgtggatgtgttgctgtagtgtgatccacattcccagttatccacaaagaccatgccagccatagaaggaacttgtagggcctatagctatgttcagatacttctcagtgagtagtcacttagaatcatgaggaaaagggagagaggcattctatatgctagctcctcctgcagagacgctgacatttcacatgtaattggtctcagaagaaaaccatcctgcaccacagaaacacggctgtgctggagtagagacctgtacgcagggagagggaagtcaggagctgtgtccttcctggccatgaagaggaacagaaatcccctgggtggtcttagaaacactcagcaccctggggtctgtgtggccctgtagtaattacctagttaggcagtgcaacccactgctgatgaaaaattgaaaacctaacattgtttagtttgttttgggctttgcttttagttttctgagtcaggcttgctatttacactaggctggcctcaaacttgtgttaatcctcctgcctttgcctcctgagtgccaggattccaggcatacaccactatacccagcattacactactttaagatctagttggtgagaggggctggtggtgacaaccttgggagattaattctgaacaggacccaaccttccctctccccttccatctaaaatgaaataaaagcagttacatgacaataaaaccatctcacattggcaggcatgctgtcccaaagcatgtttcagagcaggcttatgttatctccaagtccatcctaccaagtctgccattagctgggacttaccccagacttggatcttggctggctgtggccaatctgggaggacaggagggatggatggctccacaggtgggcttgtatctgcaatcctgctagcagtagctaggggaacgactgctgcatgctttcctgagagaaaccaggaaaaccttagtcacagcctcatgcttacatttggggtcctttcagccacagaacccagcagtaataggggcaagagcaacgtgggtgggaagagtgaagcagccatcttccctaagtcactacacttgagggtcctaagatctgggtggccccttgctcagaccacagccaaaagccagtttgctttaatatataagatggtgagggctttgttcctttataggggtatggtctcactctcacactaagctgtgcaaggctagcctaaaactcaccacagtttgtgattagtgctaggactataggcatgaaccaccgtacccaacccactcagcactacgtccaagacactacagtcttctggcagccattggctctacctacaggggcagcatgcactgcagtgtggccaaatgcacctggactcaggagcctttgagtgacagatctacctccttagcttcaaggttaactgatacagcccaagtgcacactggactgggtcaaccagacaggaagagcaacatgggaaggatgtagttggtcaagcagccttctctggcaactactgggccttccacccagggcaacccggactgccagctgggtgaattcatgggcccaactccagcttttggcagccagtatgaagtgtagggataaagggttctggacctgaccagatgggcctcacggggtgggggtgggggtcgctaggtgtgtggaggtgtgtgtgtgtgagacccctctcaaaaagagccaggggccttctgggactgctttttccatggaaagctggtaggagttgcactaaaggcaaccgaatgaggacctctttcccccaacctgggtggtggttcagcaatcaccgcctcgcctccggcagctcacacaaagcttagattcaatgccgcgcctcccacagcagaaggaggaaggttgcaggattcgacaggccaaggctgtacaggcgggaagccttggctaggagctgcacccacatccccgagaggaggccaggccaaccagcaggcacaaaggtgaaggaagtgacttcctctatgtccacactgctcctccgacttccctctagtcccctggaataggctttcccgccccggacaccccgcgccactcggcgcctttggcccaggctcaaggtcttgtgatgtgattagcaaagccagcgccttgtcctcagacactcggctctgccccacaggccgcagcgctcaagtcctgtttactgagcctgggcggggagaggggcggagaaacgcgccaatgctcctccaggctggccgctcccgcccccacccctactgcgtctccacgtgcagccgggccggagctgccacctacgggacaggccgcgacccccgttcctagtcccaagcaacttggccaagcgcaccattgctgttttgctgttcccgcgcgcggagcaaaaactaggatgggagataaaagctgcgccagtcggcccagccggatcgggcgaggaaaggcacgtcccgggtagccccgtcctgggcagatagaacgtgtacgtgctttccaacgttatactcgtagaggcggaggagagcgaggtattcccgccgccgccacccagcaggacccaagggggccgcacgccccacgccgctcgggacgcccaggctgcccgcccctcccctcccctctcctcccctcccccgaaggggaaaaattggcggcgaccaatgagaagccgagaaggagcctgacgtccgcgggctggcgggcggcgttgcctggagaccccggccggtcagcgttcagtcccctcccccggtgcgctttgccccgccgccgcgccgctccggggctgtataaagggcgcacgctctcaggtctccgagttccaccagtccgcgagctgccgacggctcgggcggggggcgggccggggcgccgagctgcgctctcgcttctcctctgccccccactccgcgccacggcctcccgccgccgcttcctcggccgcacaagcacaactttccgtccctccttggccctcgcccgttattcatcttggttcgagtctcgccgtaccgagggcacctcccaacctccacgcttgcaatttcgaccattacaggacccagaaaaatgtcgaccacacttctgtcacccttctacgatatcgacttcttgtgcaaggtaagcaggcagccggaaaggatggcggacggcctggaaccctttggagttccgagacttgccgccgggccgggccgaggcgggagggacccttccaagttgactttgcgggtggagggaagtcctggagttagcaggactgtgtgcttgcgactgtgggcgtggagagagcgagtagcggctggagcagccgtgctcctcccgaaccgaccgcggccacgctgccgggacttcccggacagcgtttgcgccgcccaccccgtggccacgggcccaggatcacatggctagacccggagcggccggggtgggcgtcctccactctctccggcctgcgttttgcgagtgtagcggtggaggctgaatcggatcccaccagaaaccccaacaagtgggcagttgggactagggcgttcactctgcagttagccccgactctcttccccatccgattttcatcccgctcccgctcccctccctttggcagacggagaaatccctggcaaacctcaatctgaacaacatgctggacaagaaggcggtagggacgcccgtggctgctgcccccagctcgagcttcactccgggcttcctgcgacgccactccgccagcaacctccacgcgcttgcccaccctgtgcccagtccgggcagctgctcgccgaagttcccgggcgcccctaacggcggcggcagcagctgtggccccgcaggcggaggcggtctggcctcctacggccagctcaaggagccttcggggggcagcggcacggcgctggtcaccaaggagagcaaatttcgggaccgctcgttcagcgagaacggggagcgcagccagcacctcctgcacctgcagcagcagcagaaggggggcagcggctcccagatcaactccacgcgctacaagacggagctgtgccggcccttcgaggagagcggcacgtgcaagtacggcgagaagtgccagttcgcgcacggcttccacgagctgcgcagcctcacccggcaccccaagtacaagacagagctgtgccgcaccttccacaccatcggcttctgcccctacggcccgcgctgccacttcatccacaacgcggacgagcggcggcccgcgccgtcggggggcggcggcgcctccggggacctgcgagcgtttggcgcacgcgacgcgctacacctaggcttcgcccgcgagccgcggcccaagctgcatcacagcctcagtttctccggcttcccgtcgggccaccaccagccgccggggggcctggagtcgccgctgctgctcgacagccccacatcgcgcacgccgccgccgccctcctcctcggcctcgtcctgttcctcctcggcttcttcctgctcttccgcctcggcggcctccacgccctcgggcgccccgacgtgctgcgccacggcggcggcggccgcgctgctactacggccccgggggcgcggaggacctgctgagccccggagcgccgtgcgcctcctgctcgtcctccggcgctaacaacgccttcgctttcggcccggagctgagcagcctcatcacgccgctcgccatccagacccacaacttcgccgccgcggccgccgccgcctactaccgcaaccagcagcagggcctgaccggtcccgcgccacccccggcacagccccccgcggcccccgcgccgccctccccgcccttcggcttccagctgccgcgccgtctgtccgagtcgcccgtgttcgacgcgccccccagccccccggactcgctctcggaccgcgacagctacctgagcggctcgctgagctccggcagcctcagcggctccgagtcccccagcctggaccctggccgtcgcctacccatcttcagccgcctctccatctccgacgactgaggcaagggggcgcccgcgaggggttgggaaaggcacagcgggggccaccggttggggagggcgacactgcggcagacttggaggcccctccgagcacttggactcgaactctgccggaaggggccccgcccctaccctttcggttctctcgttttttttgttttttattattatttttattattattattattgtaaagattcgttcttgttgataaaagccaacgaactttttcgtatggatgaacaaaatattcacaacagggcggttgtgatgcggaaagaacaaaagataccaaacacttaggtctcagatgagtttgaaactctagttttagaagaaaaaaatcagcccagcaccagcagctaccaaccaccattccatctcttctttcactcgaaagccttagaaacagtccagatgtgagaactcttggaaggggttccaagaccagtgtgagccagccggctgccacctccctaaactataagcttctagaactcaaaataatgccaggaacatgccttgattcgagtcgctcgctctcagcctcctttgtggtggttgtttaccttgtttttgttttttagacaaagttctgtatgtctgggggtggggaagcccttgcattccaaagtttgataacgggctcattgccaccacgtagtgtgggtgtttagcttagaaccatttcctctgctctctggaagctatgggcagagctcagttcatagttgttgggaaataagtgcttcatttttagttgttctgagttgatccgcaccactgcaccacaactcaatatgaaaaactatttaacttatttattatcttgtgaaaagtatacattgaggatgttgtccatactgtatttatcgagtatgatgaaagcaatagatatatattcttttattatgttaaattataattgccattattaatcggcaaaatgtggagtgtgttcttttcacagtaatatatgccttttgtaacttcacttggttattttattgtaaatgagtaagaaaaatcttaatttaagagattgtatgtaatatttatttcattaatttctttccttgtttacgtaaatttcgaaagatcgcatgaagaaaccatgcaatcttgatgctgtggaagtggtttgaggaacattttgaggttttcttagaatgtataatggttgtagcccatccaactttaaagagagaaaggtgagactgcagtcaggctcacgtgtggcttgcttctctacatccagctttataaaccaccagctctactgtgacattgattatagagacatgtagcaataatgggggaaatggtctcagtgccttcatagggcccgaacttgccttaaatcttcctcaaccagataagtatttcattcgtgcttgagaatttgaatgtcggacgggttcacctgcacaaaaagaaaagattttttaccactttttttttactatagctatgaagtgaagaggccacatcttagcgctgaaatgttggtggtacatgaatatgccttgttcaatgacagtccaaaaacttgtactattatttttcaatgtaaagaggcaggaatgtctccggctttcctggatggcagataaatgagcagttgtttagtttgtatgtaggtacagttggagcaccgcgtgtgcactctggactactttgacagaagtaggtttttgaatgtaacaagattaagtcaacttgagttgtaatatattttggggaatcagttcactacaaattgtgactgtaaacattgtactgtaaatgttttgtagtttcccccaataaaattttttggaaaaaaactctttgagtaatggttgggggggggggttgtttgtttttaaactaggtctcctggccggggcaagtctgggaaggggtgtgttcaggaggtggggagctggcagttctggatagagcctgcatccacttgtacctgtgtttgttttcaactgaaagtaattatttggctgtcaagggcatttgttagctgttccctttggtaataagatgcatccctgtgttggctgactggttgatggcagggcctggcgggagaccgcgaggggtgtggccggcctgtgagtcacccagtgatcacgtggatgctctggctgctgaaggtccgatttttccccagtatgcctgacctgggcttgtagcctggacagggaggtctgggccaggcgttggtagctgggctcgggttttgcttggactttgggaggctgggggcatgtccttcagagagggagggaggaagatgaagccggttaaacttctatctgggtgatgtttgtttacacagacaacttcctctgggaataagcacattcaggctatttatgcaaaaggaagaggccaaaaagcaacttcatccgggctcctaccgaaggcaagcaagccgccctcagtttgcctgcctccaaagcttaggaagtaaaatcgtttgtgcttttggggtttttttgtttttaccctgctcgttttaaaacaatcttttaaactcagtagagttaggttttcctaccccacccccatacacagttcagacaccttttccaaagtaggcaagagtttgggctctatcaaccaatccttgcccgcctctggttggttgcccctgccttggccagggtctcctgtgactcacagctggggggtggagtgggggccctgtctgagggatgcgccaagctgggcagctgtttccagttaaggaagatggagctggtgctcactggagcagactttttttttttttttttttttttttttttgcgggggtgggggtggggtgcttgctttcgaaagttgtcccagatgtttggccttgggggggttggagggagccggaggccaagaaggcctggggctgggtgaagcccctgcagctccgtggcctccaggccataaagaatgcagcccgcggaggaaatggccccacagtggagctatttaggcccggctttcatttcaaagaccttgtttccacttcattctcaaattatttttctaaacaagtacttttgatcagctggaatgttggacttctctttggggtaagccacattcattttttaaaactgctctgaaagcccagagctggggctctggagttctgtgttttggctcgcattgtggggagcttggaaaggtaggtggtcattcattcacaggttttctcacccacacatcagtggggacgttggatcactgtgcctcggcagtgcccagaatcaaccgtgtttacttgaatacccttaggacagtgtctttgtaaatctgggacctagaagtaaaacttggaggactagccaccacaggctacagagtggagctaaaagcagggaggccggaggcttaatctagatgggactcatcctgagccgttgtgggtccagaccggagtgaatccaagaagcccccacactgcctgctgggagactggggtgggtatacaccaccgtagaaatcattccggaagggtgccacatacaagtgcaggtcttctgcgccttctgtctgaatctcctgctatccatgggaaaagcagcaggcacaattgagaaac

SEQ ID NO: 240 - DNA, 1228 bp, Mus musculus
aggtttttcatctgttacaagcctacattacagactgcagacacagaacaaatgcagatttcctgcaagagctgagtgatgtcactgcttgtaccaaagccaaactctggctggccatgaggcaaaatccatgcctggtaaccagagctgtgtatattgatattctcttcctgctgactaactgcctggacagacctgaggaaggcaagcagacagctctggagagtcttggcttctgggaagatgtgagaagaattatcctggaatcagagctgattaaggggttcccctggaccttcaaggtgccaggcttgccccagtatctgcagagccttaccaaactagccatccctgaagtgtgggcgtcgcttgctgaagctaaagggcaggcgactgctgttcctctctccttctctcggcttctgaagtcttcctttcctgaagtgcgcttgctagccctagacaccttgctggaaagggcaaggtcctctgaacaggagcagaaggagccacttcctctgctctgcagtatgggagaggagcttctactgctggcgatgaaggaagaccaccccggatgtttctgcaggaacaaagattcactcgcccctgagctgaggcagtgggtccagctggttgtctggtcctgtggagaccatcttcctactgcatctagactggctgttgctgaagtcctcacaagcaccgcacccctgttcctcaccagtccccagcccattctcgaactgcagggcacactttctctctggaggtgtgttcttacccttctgcagagtgaggagcaaaccgtcagagaggcagccacagaaatcgtgacaacagccatgtcacaaggaaacacttgccagtcaacagaatttgccttctgccaggtggatgcctccattgctctgaccctggccttagctgttctgtgtgacttgctccagcagtgggaccagctggagccaggactgcctattctactgggatggctactggaagagggtgatgacctcgagggccacgtgcagagcccacatcagggggaagaagagcatatctttgaaaaatcagaagtcaacttctgggctgagactctgaccttcgtgaaatccctgtgtaggcaactcttccatctcctctgtcaatctggctggcagtcccctcactcccagaagctctgtcacttgcaaaggatagcatcagagcagagtcacctcatctc

SEQ ID NO: 241 - protein, 403 aa, Mus musculus
  VARIANT (1)...(403): Xaa = Any Amino Acid
VFHLLQAYITDCRHRTNADFLQELSDVTACTKAKLWLAMRQNPCLVTRAVYIDILFLLTNCLDRPEEGKQTALESLGFWEDVRRIISELIKGFPWTFKVPGLPQYLQSLTKLAIPEVWASLAEAKGQATAVPLSFSRLLKSSFPEVRLLALDTLLERARSSEQEQKEPLPLLCSMGEELLLLAMKEDHPGCFCRNKDSLAPELRQWVQLVVWSCGDHLPTASRLAVAEVLTSTAPLFLTSPQPILQGTLSLWRCVLTLLQSEEQTVREAATEIVTTAMSQGNTCQSTEFAFCQVDASIALTLAVLCDLLQQWDQLEPGLPILLGWLLEEGDDLEGHVQSPHQGEEEHIFEKSEVNFWAETLTFVKSLCRQLFHLLCQSGWQSPHSQKLCHLQRIASEQSHLIX

SEQ ID NO: 242 - DNA, 355211 bp, Homo sapiens
  misc_feature (1)...(355211): n = A,T,C or G
gtggtggcatgcgcctgtagtctcagctacgtgggaggctgaggtgagaacattgcttgagcccaggaggccgaggatgcagtgagatatgattgtgccactgcactcaagcctgggcgacagagtgagatcctgtcttaaaaaaataaataaataaaattattgctgcaggttagcctgtaaagaacatttctaaaattaatttttaacattttcaatgttatcgtttttaaaaactataaaaatttttatatgtatagtgttttagaatttataaagaacttcaacataggtaatctaatgtgatcctcaaatggctactatataggataagaaatctaatttgttgaatgggcaaagggaggcttagaaaagtaaatgcttacctgagaccatattgctaataagaacctgaaacagcaatcttagaaggtcttctgacttcatggggctgtattttgtatttttgtggtgtttttgccataatggctgaaagtgatcatgtatatgaaatgtcgaaacatatatacagcttgataatactgaacatatgaataaaggaggaaaactaaaataattttttacatatttgagctatattatgcaattcataaatttgaagtgtacaattcagtttattagtttattcacagagttgtacaaccaccagcatttctaaaattaatttttaatattctctttgctatattttttctttaaaaatttttttcctgaaatttgtttttagcatcattttttaaaactataaaagtttctacatgtgtagtgctttagaatttatgaagcactttaacataggtaatctaaagtgatccttatcaacatttctgaaatgaagttttaacatcttaaaagttaattcaaacaactttagaatatttttatcacagagaagccccattcccccaaccatctccaacacttggctttccttatcttttaaattacatgtgtaggccgggcatggtggctcaagcctgtaatcccaggcttgcagatctcaggcaggtggatcacttgaggtcaggagttcaagaccagcctggtcaacatggtgaaaccctgtctctactaaaaatacaaaaaattagctaggcatgggggcatgcgcctgtaatcccagctactgaggcggctgaggcaggagaatcgcttgaacctgggaggcaggggttgcagtgagccgagatcgcaccactgcactccagcctgggtgacagcaagaccctgtctcaaataaataaataaataaataacttgtgtaatcatcacagtcaaggtagtgaatatttccatcatcccccaaatttccctatgtcccttcctggactattattatttttgagacaaagtctcgctttgtcacccaggctggagtgtagtggcatgagcacagctcattgcagtctcactcctgagctcaagcaatcctcccacctcagcttcccaagtagctgggactgtaggtgtgtgtcaccacacccagctaaatttttaaattttttatagagatggggtttcactatattgcctaggctgatcttgaactgctttctggattattttttacaaggtaaaaagaatcatatacaaatttgagatctgttttggctttacttgtagttttttgttcttgtaaatttaataattgaaatttgtggtcattctttgtatttaatatttttaaagtctaaattgttataaaatgaaatttcttttactaatcagtttacaataatggctcatggctcatttttcttcaggattaaagagccaacgctggaaatgtttctgtctagaatcttagcatcctggactaattcagccatacaagtccttgaatcaagttccccgagcctaacggacagcctgaatgggaattcaagtatagttgggagacttttggaatatgtctatacccattgggaacatccattggatgctctgagacaccaaaccaaaatcatgttcaaaaaccttctccaaatgcaccggctcactgtggaaggtgcagatttcgtccctgatcctttctttgtggaattgactgagagtcttttacgattggaatggcatattaaaggaaagtacacgtgccttggttgtttggtagagtgcataggagttgaacatattttggctatagataaaactattccatctcaaatcttagaggtgatgggagaccagtcattggtaccttatgcaagtgacctcttggaaaccatgtttagaaatcataagagtcatttgaaatcccagactgctgagagttcttggattgaccagtggcatgagacttgggtttctcctctcctttttatattgtgtgaaggaaacttggatcaaaaatcttacgtgattgattattacttgccaaaattattaagttacagccctgaaagcttacagtacatggtaaagattcttcagacttctattgatgctaaaactggtaagaaaaatgcatttttgttttagtagtttctaattatgatgcttaaatgtaggtagctatgcagatactaatcatattcaaatttaaatatcacttctataaatagtaaaggaagagattaatgatagatgtttcagtttgaaacgaatgttcctatatatagctgaatggagttttttggctgaagtcatttctacaagctaaagaataattccacttaaaatgataaactttcctgtattacaaggttttaattcattttttcaagttctgaatttattttattgtatcactgaaataaaagtttgtgtgtcttatataatgtgcttattcaagtcattgagacaataattaaaaattgtgttaggcaaggttaaagacaggtaacttggcagtagcaagtttttttctctggggaagtgacaaaattcagaggcatgatctcaagaaatagccatctatagttatttagaataggggtaaacatcccattgaaactcacaaaccctacaggaatcactgcattcaagcataattcaggatgtgtaaagtgatgatcatgacacatcatataaatcttaaaattattacattctgtttaacaaagcaagaatgtagtatcgtacagcataattttaagaaatattttcaactaaaattgttaaaaacgttcagtacttcaaagagtaaccatgaggtagcaggaaaatttgattcctgtatgcaaaaataagccattatttgtaatttttgacaacacttgttcttgagtttttgaaaagccatctgaaattcaggattcaagaatctgttctgaagtaaggttgtctttatttttatatcaagctgccctgtcttcttggtaatggctgacgtcctagcctctgaaaccagcaggctctttgtgttccttttttaatctttactagtgagaaacagccactctaaaatatgcagagaggttcagtgtttacttttagagaagtaatagtctgtagccactgatgtgcttatttctccacctgattttatttcctgatttgctgcctgattccctttctaggtgttagggaaaaagcaaaaatgttagcaggtaaataatgatttgtttatgttaacgataagagaattatgcttacttgaaatgattgacaaaagggcaaatcatattaaataatgattattttagaataggaactttaatttgtgttagaaatgagtttaaaatgtgatttttatttattgaaataaaatgttaattggaaacatgaaaattagcagctgataattatagtagtcattgcataatacagtaatggtctttgttattgtgctttcaggacaagagcaatctttcccatccttagggtcttgtaatagcaggggggctctgggagctttgatggcatgtctgcgaatagctagagctcatggacatcttcagtctgcaactgatacctgggagaacctcgtgtctgatgcaagaataaagcaaggcttaattcatcagcattgccaagtaagtaaagaaaattacctggatttgtacatgcagtagatccctttcatgtagcagttcaatatagaggcccctacattgtatcctgaactgttttagggagttcataaagagaatgagtagaaaccctagtctcccaactaaactttcagtaggccctttcttcaagctactgaaagtttagttgaggatgtaagaaaacttacataaaacaactggaaactcttagaactgacaatacagatacaagcatgccatcatgtgcccttaaatacataaggactcgcttggaaggctcagaagagactgatcagagcaggtggtgcttgattaggaaagtgatagatatgattagaaaagaggaagccttggagcagcatacaaaatggagggacccaaatgagcaaggtctggaggatgattaagaacattgcttatcaggggtggagtgttttggacattttttggaaaggcctaatgctaggctaaagacttagttggttcccaggcaccagctggttttactaagctaaaccaaagctactctgttttcagcaaggagttacattagtggaaacgtgagtttccagagtgggagcagaaagaaaccaggaaaccagttagaagtgtctggcagtaatttaagagtgaggtgatggggtaaaaggggtcactggaaaaaaagaaaaaggaatgaagctgagcattaccacggaataaaaatctttaagattgttgcattttataaatccccaatttacatgtttaataaaagaattgtataggaaataaccctaggatctttgagattaggaaacctttctgaggtacctattggtgaactgaagtttacttttttccttttgtagcctatgtaagtaaacaattcaagtgatttaggctttgcttatttcttggaaaattaacattttattgcttgatgttttttaggtaaggatagatacattaggcttgctttgtgaaagtaatcggagcacagaaattgtttccatggaagaaatgcagtggattcagttctttattacatacaatcttaacagccagtctccaggagtgcggcaacagatctgttctcttcttaaaaaggtagaatttcccatcagaaggcatagggaagtggtgaactttgtttgggaaatcgtttttaaaaagagcccagattttgggagcgtgtgggaatggtcatggaattgggctaccacatctgttcatgacggccgttctgtgacctgttctctcattccataaagcttacatttgggattaaaatccagagtgaaaagcacgcacccctccccccaccattttttttcaggagttcagaatcagcctgggcaacacagtcaaaccccatctctactaaaatacaaaaaaattagccggttgtggcagtgtgtgcctgtagtcctagctatttgggaggctgaagcaggagaattgcttgaacctaggagcggaggttgcagtgagccgagattgtaccactgcactccagcctgggcaacagagtgagactcggtctccaaaaaaaaaaaaaaaaaaatagtcttgctctgtcagccaggctggagtgcagtggtgtgatcatagctcactgtaccctcaacctcccaggctcaagcgattcttcctccccagcctctgaagtagctgggatgacaggggcacaccaccatgcctgactaatatttaatttttttttagagatagtgtcttgctctgttacccaggctggtcttaaactcctggactctagtggtcctgccacctcagcctcccaaagtgttgtggttacaggcatgagccaccacacatggccaaaaggcctttcattttggtgtagtaaatcaaccttgggctcttttttgtaaagaaaaagtctaatgctggagttaaggtagttttaagaaaacttggtaacagcatttttatagtttaagcacctcaaaaaagatcattatcaaataatctaacttgaattaattgcacacacatttatggggtgaagaattggtaaagtagggaaatgactaaatcatcttcaggtttgtgccaacttaaaggaaacagaattgtggtttaatgacagtattctgctttgcagtaatagtttgtttttggtataaaaattattttctgtcaaaaagaaacattataaaatattaagagcttaaaaatctgtactcttcttgcctgaagttttattctaaataatttgcctctcaggctgacatttaaatttaatgtgtggctcacctgtgcttcatttcctttgtttcaaaagttgttttgtaggatacaggaaagttctcaggtactttataaattggagcagagtaaatccaaacgtgaaccagagaatgagttaaccaaacagcacccttctgtttctttacagcagtataaggtaggtgatatatttctaaacatgagagtttttttttaaattaaaaagtattatgaataagcattaaagggaaataaatggaagtctcttggtaaattgtgtttctgtgtttttttccttcaagctgagtattacctatttctggtgctttggtactctacttgatgtagcctgggttatggaaccagtgctgtaccggaggactgttacagaatgacgttagtgggctaacctcaatcactttcagcttatgtgggcgagatgaatttagtacttttaacagaagggtaattgacagtactgaactctgtccctctccagggcagaagactgctgttgctgggcctgttttctctttagtttgagatgacttacagaggcttgatattaatgactcttggcccatggtccagctgtggagggagcttgctgtctgtgtcacattggagtgagcttgaagagtagggctggattttagggcattgtgttaatgaaatggatggaaacctgggtgcagcagctccagtctgggccagggcttagcttgacaatcttgaatttcttttcagcagaacagattgagcttttcactgttcttcccccaaatctagcctttgagaagcagacccttttttgctcctcaggcccagacagaagacagagcttacctatttattttaagaaagaggtagattaatagattaatgatacgtttgaactatgacatgctcactacttactctaaacattattatggatgcccttggttttcaattttgtatttaaaagataaaaagccatcaaacaaagagtatttatatacaaagggtaaaattagcttcgaccttttaaaatctcaatgacgaagattgggacgtcacaacctgaactttaaagacatgggtttactcctgattctgccacttattagttggctgacttgagtctcgtcaactataagcagaattagtaacctttctcaaagattgatttgaggattaaatgaaaaagctctttgtagactatatatctctccacttgatcttagctaaaaggccgagaagtgatgtaaactatatatctctctacaaagccttgctgggagtcattaaaagcgactagtggtggctcatgcctataatctcagcactttgggaggttgaggcaggaggatcacttgagtccaggacttcaagactagcctgggcaacatagcaagaccccatctctattaaaagaaaaaggcaaccctgagacgggcgtggtggtgtgcacctgtgttcccagatactctggaggcttagggttgaaggttgctggagtctgggaggtgagggctgtggtgagccttaattgtagcactgcactccatcctgagcaacagagcagcgagaccctgcttcaaaaaaattaataaataaaaattttaaaagtgactagaatatatattgaagcccccagtgtgtgtgtaggatagttaaaaaaattttttttaattaattaattctttgtagatgtaggttcttgctgtgttacccaggctggtttcaaaatcctggcctcaaatgattccccccactccacctcccaaagtgctgggattacaggcatgacatactacctattctaaacattattatggatcattgtggatattatgcccagcctagttattttgtagtttctcttagatcattggtagatttaacaatgcatatctcgtttgctttctttttgcaaggggtaaaatgacatttgtgaaaactcaggtacttggaaacacaaaagctgttttttggattgagattgtgaattttcatgtatgcatggtttcttggtctgtgttataggtatgcatgttttgaaaactagtcctttgagtcttaatctgagtcagtctcatggttgtggtactttttccctactggtacacctgtggcttttagaggttgtgaccttggcactatattgttataatcgtcacaccatcataagagtgggtgccatgcacagggtgtggtaggctcacaatcaatagactaagtgctgggggagaagaggaggctattagttgaaaaagacatcttctaggctagtggagattattttatacctaaataactgatattagtaactagagtacttttaaatttataaaatattagatgtccatgttctcatttaacctttaataaaaaggctgtgagataacattcttatccccacttaacaagtgagaaagctgaagctcagtgaagttcaataacctgtgtaaggttcctcagctagtaagtggtagagtcagaactccaatccagacctgctcttgactccaaaatctcagtattttctcccccccacccccagtagtagcttaatgaaggcttggagataagaaagtacagggagaactcagggaatggtgaattcactgatgtgaatgacataaaataccttggggaatggaggacttgagtaatgggaagtgaatccaaagaatcaagttgaaaatggatagctttcagtgataggccaacggatttggaagcttcactgggaaccattaaaagtgattagagcatatactgagcattactatgtatgtaggatagtgtgctcagcactagggatccaaccatagaaatgtggtccctgcatatattgtggctacagtctgattgcaggaaacaagaactatattaaaccatataaatgacaatacggtttgaatgatacttcttagtggatgatcttgttttttttcagagggagtttcgctctttcgcccaggccagactgcagtggcgtgatcttggctcactgcaacctctgcctcctgggttcaagcaattctcctgcctcagcctcccgagtagctgggactacaggcctctgccaccacacctggctaatttttgtatttttagtagagacagggtttcatgttggacatgctggtctcgaacttctgacctcaggtgatctgcccacctcggcctcccaaagtgctgggattacaggcatgagccaccacgcctggcccttgttgtgttttaatgtgaatcctgttttacttataattaaaagtagcttaactaggatatttttcagtaatggccctatttctttgaaaccgaatagaattaataacctaataaactcttagggcttgtgggacctaaaggataattccccagggttgcatgtccttcacctgagaaatgaatgcagggatctttggtagagtcagttaagactagggctgttgaacccagcgagactctgtcttaaaaaaaaaaaaaaagtgtacgtatctgtctgggctacaatagaaattgtacttcttgttgactctgcaaatatagggtttattaaagtcataatatagcttatggtcaagggtgctaacctgaattattaagcaaagtgaacaaccagtatcattttttgaaatgttttatttttaaattgaaaacaaaaacacccactcttaaagggtgtttaatactctgaatataacctattgtgacgtaattatacttactgtaattttttttttttttttaagaatttcatgtcatccatttgtaacagtctttttgaagcattgtttcctggatcttcctactcgactagattttcagctttaaccattttaggttcaatagctgaagtttttcatgtcccagaaggtaagtgtttaataatgttaggggaagtaatttttgttttctttcaaaacatacttattctacattttgctttatttgaagtttcagttttgttgcctttctttgaggttttattcttaccttataattcttgcttgtacataatgaaatttgctagtaaaggacagaagaggaagaaactatctcccttttcattgatcattatttgccaaccccaaagtataattttcatggattatgcttattatggaaagagttccagctattacctcactaatttgtttgttgctgttttaagatagtatccaatctgttctttaagttttaaaatttgaaataataatagcttctattatatttaatatttctcagtgagtctctgtggttaaaatgtggtttcctttacatgccgtctgtttcatgtgcctcagtctggtttcggaaagacaatatgaggatgtaatttccaagtattctgatttaataataccctttgtttttccttctgtgtggttctcaagagggtcaaatttcagttccctctttgaatctttttttttgtttcattttttcctttttgacaagaaatgattcctttttttttattttgagagagagtctagctctgttgcccaggctggagtgtggtggcgtgatctcggctcactgcaacctccgcctgctgggttcaagcgattctcctgcctcagcctcccgagtagctgggacttcaggcgcatgccgctacacctggctaattttttgtatttttagtagagatggggtttcaccatgttaagtcaggatggtctcgatctcctgacctcgtgatctgcccgcctcggcctcccaaagtggtgagattacaggcgtgagccaccgtgtcctgctgaaatgattcttttttccctgtatatgtgtgtatatgtgttagaatgtgggatttcttgcttgtgctgtcttcgttgactgtggtcaaacaggaaaatatcctgctcagctgctccttcacagggaatggccaaagcatgagggagctttacactatcattggattcttttttattttaaattattgggcaaagtgtaattttttgacaggaggacagttagctaatgtaaaagaggcttgcttcatttggggaaaatcagtttttaaaagtttttattctgaaaaaatttaaatcagcagcaaagtttcaagactggttcaatgaatagctatttatgctctacctagattcatcttttttttttttttttttgagacggagtctcgctctgttgcccaggctggggtacagtggcatgatcaccgtgacctctgcctcctgggttcaagcagttctcctgtctcagcctcctgagtagctgggattacaggcacgtgccaccacgcccaggttaatttttgtatttttagtagagacggggtttcaccatgttggtcaggctggtctcgaactcctgacctcaggttgtccgccttgcttagtctcccaaagtgctgggattacaggtgtgagccaccgcacctggccaattcatcagttattaatattttgcaatatttgctatatctgtgtcctttattaattctataaccataacacaatgatcaaattcaggaaattgaatgttgatacaatgctttaattgaatacgcaatccatatttaaattttgccaattgtcccaacaaatggccttttatattatagaacaaaaagcttcctacaatctgggaagcaatcctagatcacgcattgcgttttgttattatgcctctttttagcttcctttaatctggaaagtttctaattttatgatattaacattttggaagaatatgtctcagggtttgtctcattgtttcctgatgatttgattcatgctgtacatttttgcaggaatgttgcataggtgataatggtgttcttcacagggcatcctattagagtattgatgatactggcttgttccagtttttataataggaaatatgatcaccttattcacgtggggatggcaggctgaaaaatggtctctaaaacacatccacatcaaatctttagaagctgtgaatgcaaaccttacatggaagaagggtccttgcagatattcttaagtttaggatcttgaggtgagataattctagattatcttgatggatcaaaaatgtcatcacaagtatccttacaagacagaggcagagagagatttgacaaacaaaagaaagaggaggcagtgcgacagcgtaggtagagattggcgtgagatggctacaggccatggaatgcctgcagctgctagaagctggaagaggcaaggaacagattttagagcctctggagtgcatggccctactgacaccttgattttgaacttctggcttccagaactatgagagaataggtttctgtggttttaagcaccaagtatgtggtaatttgttacagcatccagtgaatgcaggagtctcccatcagttcatagaatttcaatagtacttcaacttaatttagaaaataagtttttaccttagagtgattgattacttcaaccatataacaaaaagttttctgcacatttaaagcagttgtagctgcatctaagtgtgtgggaaataaaactaggctgaagcgtacctataatttttcagtcaagagagtaatttaatacatttaaatgtactttaaaaatgaaaaccctgagtcatctttctaatgaatgagttgcatgtaattgggcagtgacttaatgccatcgtaattatgttagacaactgggaggtaatgcaaatggagcaagccatactgcaggcattacttttaaaggaggcttaagaaccttgactatgaagtacaggatgggagatgtaaattcatccttcattatcatctcaagaacttcagtggtaggactgatttgagattagtcaaatggtttctgcctttcctagaccaggaagaataagttgcatgcatctttcttatgtggaatcaaatgccacaatattgatggtaaaaaaaaatctacaattagattaaaaggatttgttcagcaaatattaatttcgtgcttattatatgtcaagcagccgaggatattcacagtcccaaacaaggtgcttcttcctttggagcttatgtttcagtgaagggagatagtaatgaacaagtaatacatagaatttgtgtatattagtacattatgtagatacaagattatgtagattatttatgtacaagatgtagataagttctgtgaaaagtatttcaagaagataagggggatatatagaagacctaggaggctggagagtgttagtggcttcatacagtggtgtcataaagggcttcacatttgaaaaaagctcttaaacaactgatggataaaagaataaatcatgaaggaagttagaaaatattttgagatgaatgaaagcaaaaatacaacgtacgaaaacttatgcattgcagcaaaagctgtgcttatagggaaagttatagctgtaaatgcctacattaaaagatcttgaattaataaccaagttaactttccacctcaagcaattagaagagaagaacaaacttaaaaggaaggaaacaaaaagattagaacagagataaatgaaatagaaaacagaaaaacaacacgaataatctacgaaaccagaagttgtgttttttaaagattaacaaatagacaaagtttgctaaactgactaagataaaagaaagacagtataaacaactaaaatcagaaatgaaagtaggaacatttctattaagtttgcagaaataaaaatgattataagacagtacagtgaacaattgtaacaccaacaagttagataacctacatgaaatggacaagtttctagaaacatgacaattagtgacttgagaagaaatagaaaatgtgagcagacctataagagattgaatcagtattcaaaaggctcacagaggaagagaaggttcagggcaagtgacttctctggtgaaatctacaaagcatttaaagaagaattacaccagtccttctcagactctttcaaaaaattggagagaagggaacacctcctacctcattttataaggccatgattaccccgataccaaaaccaaagacacttaaaagaaaaccagccgggtgtggtggctcatgcctgtaatcccaccactttgggaggccgagtcaggtggatcacctgagatcaggagtttaagaccagactggccaacatggtgaaaccccgtcgctactaaaaatacaaaaaattagccgggcgtggtggcaggtacctgtaatcccagctactcaggaggctgaggcaggagaattgcctgaacccaggaggctgaggtttcaatgggctgagattgcgccattgtactccagcctgggcgacaagagcaagacttcatcaaagaaaagagaagaaaacagaggagaagagaaggaaaagaagaaagaaaaggaaagaaaaaaccaaagaccaatatcctttatggatatagaggcaaaaaccctcaatagaatactagcaaaccaaatccaacagcatattaaaagtgttatataccattagtaagtggaatttatcccaggaatgtaagggtgggtcaatttaagaataatagtcaatgtaatacaccacattaaaatgaaaatggaaataccatgtgatcgtctcaatttttgcagaaaaggcatttgacagaattcagtacccttttatgattaaaaaaatgagcacagcaaaactagaaataggaaggacaagatgatgaaggacatttgtaacacaaccacaggtaacatcacactcactggtgagaaactgaaagcttttgtcctaagatcaggaagaagacacagatgcccactgtcatcactgctgttcaccattgtactgaaagttctagccagagcaattatacaagaaaaaaataaaaagcagtgagattggaaaacaagaagcaaatctgagcagagttgttaaggaagtaacaaaaacctcaggtgtcggctctaggaatttcatagggttgttctaacttgtaaattaaaattaaatgagaagtttgtatcccaatttatattcctcaaattaactaagcataataatgttttcagttttcattaggagttcacttgtgaaatgtttttaaatgttcttcacattttgccatgaaacctgtttttccacagttcttgagttttcatcctagagttaagtggagtcagtgattaccatcattctttgggataatttttcttttcatcccttggttggctgaaattcctttttctctaagagtttctggagataagtagttcttaatttcttgcatattataaaatgtttctattgttcttacacttgaataagagtttgataggcaaagttcttcacaccttcattccctgaggattttgtaagcattgctccattatcttttagcactacatgttgttatagggatgagtgaagccagtctaattttttccattttgtagatgaattgagcttttccctgaagggccaaaagattccttctttatctttgactcccagtaagtctatcaggatatgtcatcatactgatcattctatgtcagttcactctaagatatggtaggactttgcttttttttttttttttttttttgagaccaagtctcactctgttgcgcaggctggagtgcactgacatgagctcagctcactgcaatctccgtctcctggcctcgagcgattctgctgcctcagcctcccaagtagctgggattacagtcgtgtgccactatgcctggctaatttttgtgtttttagtagagaaggggttttactttgttggccagactggtctcaaactcttgacctcaggtgatccacccacctcagcctcccaaagtgctgggattacaggtgtgagccgctgagcctggccagaactttgtattctaggtcaagaagttttattaggatttttaaaaagatgtgtttctaaatttacttgtttttgtttatttttaacaataacttagaaatcttttatatagtatctttcaaaagataatggaatggtttaaaaatcttttttaatttggagaactgtagtacttattttgtcattttaagaaataaattaatggaaaagttactgttttagctatcatgggtaaagtatgaagtgtggttttttggtacttattttctataaatttggtcaaataacttcagaagactgatttctttttgttcacttttaaatctttttgtttttaaaatatttttaggcagaatttatacagtatatcagctgagtcatgatattgatgttggtcgtttccaaacactaatggaatgttttaccagcacttttgaagacgtgaaaattttagcatttgatcttctgatgaagttatcaaaaacagctgtacattttcaggtatcaggacttttctagtataaatgtggtatatgcatggaaactttctatcagcagataaagcaatctgaggattattcatgtgctttgcatctgcctgctcatgtttttggactgtttctttcagttatcattaacacctctctactattttggggttagtgggaaaggaggaaatatcaaaaagtaaataaggcacaaatcagtgagctttgctgtttttattgctttgataaaaagggaggtgtaggaggtggtaggttttattgtttacaagattattggtagattttagttaactgtggtttcccctgttcccttggacatgtaatattcgatcagaacacatcacttacagtaacttgcatttttcgagataatctccctttttcatacacttgagaaactgagtgtaaatgaggtagagaggatgtttctggtttttgaaccagcaatagctaaactgagactgaaacttaccgagtacttgaggttaacaacagttcctagtgctctacctcatccccagcccctccattcttcctgacacattgctcttcccactttggggtaggaattaaaggtggggttggaagtgaacacattgtgtggggatgagtctgcaggggacttccagaccctggctcttagctctgcccttgaggcttctcctagggctgttgggtcaccagcagagtactggttctggagcttagctatggctttctattagagctctataaaggccgagggtttctgctgcagctgagccatggtctaggctgtggttgttcagctgtgtttagggcatggtagcttgtagatgcagtggattctgtaggatcacatgccagagaggatagtgtctgtttctgtggcttctagatggctatgtagaacatctatctatctgtatctctcagaacatcaatcttttttgacttgggtccatattggaagttgctgtacagcatctaccgatgcctatgatttttcaggtgcccttgtgagcagaaagttccctggtgctcaggctgctaacttttgttaccatacacagtttttaaagaggagattttctcttcctctgtctgccactcctcaccttatcattcatcacatgtcacctcatattgtgtcaatagcgatgccccattcttggcaaatattttgagagtacctggatggagaaggcatattatggcataaatgtgaaagacctggcccttacatcactaaggggctcaggggacctctgcatctctaaatttgataaacccgtgcttggtatattgacactagccatagaattcaagaaatttagtaccacatgtggtttgctataggattttgattatactctctggcttgcagattagtaaaatagttaaaggaataggcattcaagatttaaaaatattaattatatatttgtattagggttttctagagggacagaactaataggatagatgtatatataaaggagagtttattaaggagtattgactcacacgatcacaagctgaggccccacaatagccctctgcaagctgaggagcaaggaagctaaagctgaagaacttgcaagagtctgatgttccagcgcaggaagcatccagcatgggagaagtaggccagaagactaaaccagtctaatctttccatgttcttcttcctgcttttattcttgctgcactggcatctgattagattgtgtttacccaggtggaggatggatctgcctttcccagtccactgattgaaatattaatctcctttggcaacaccctcacagacacacacaggaacaatactttgcatccttcaatccaatcaagctgacactcagtattaaccatcacaatattatatttccaaagtctttctttgggtgtcccttatataatatataattaatttttaatacagttaagtgtacagcagtttttgaatgctaacctgatctctctaaggacgtgtacatacgtattgttgacggcatatttttctcataaatagcttgactatcctactcacctaggttactctccttctttggagctgcatatcctaggtcttttgtcatattatacttcgattgacctaagatgacggaacaaagacattttagacttcaaaggctatttattatctttcttactaatgattaataaaacagttctgggacttaactgtcagttaaaaaatggtttagatgcttaattggttctttctaatacttatttaaacttgaactttggccactacttttaagttttttatttaggtcatagaaaataaacttatcaaatggtaaagaatttaaattgaaataaacagatatttaaatcagcacatttgatatccactgttgtgaaattataaaacatcatcaaatatttgtagacctataatcaacttcaaaattgagtgtataattattttttcctaacacaagatagggaataatcctagtagaatcagaatattattgagcagccaaaccctgacttccagacttatgaacacacagcttgccagttgttgaagttgggactaggacttatgtcttctgttgtcagcccagtgcctttccatgactacaacagcaaactgtcctttgttctgtcttctttaggacaggcgatgtgagtggatgtttctgtgagatataggtgtgggagctctgatgcataatttctgaggctgaattgatcactttgttttccacacacacaaagtttcaccaggtacagcctcccaggggatttgcagttttctccagtgaactacctgtataggaaggaggaagggagaagggcagccatatgatgcccaggtgaaacataagccctgagagactatgaactgccctgtctagaaatagtaaagatagtctggctgtagtcatagcaaaattctacaggacaaagtacacttttgctgaagaaagaagcagttttaaaaaaaggttttatcagtgttgaatttcccaattgaaattatttccagctgattaataatcattaattactgtaataaaaaactcacctatattcagggagagaggaaactaatgtttatattgacttacaattatatgccaggctgtgttgttttgttttgttttgttttttttcttttaatagagacagggtctcactctattgcctaggctggagcacagtggtgcaatcactgctcactgcagccatgaactcctgagctcgagtgatcctcacctctcagcctcttgaatggctgggactacaggtgtgcaccattacacccagctaatttttaaggtttttcgtagagtttttgtagagtaagttttttgtctcaccgtgttgcccaggctggtctcaagactcctaacctcaagtgatcctcccatcttggccttccaaagtgatggggttacagatatgagccactgcaccaagcctgtgttttttgttgttgtttttttgagatggggtctcactatgttgtcttggctgatcttgagctcctggcctcaagtaatcctcctccatcagcctcttgagtagctgggactctaggctcgagcccactgtactcagctccaggctgtgttttaaaaaatttactatttttttaaattaaagagatctttaatttgacagttactgagtctgcgctttattctaggattcggggaaactgcaaggcttatttcaggcagcattggagctcagcacaagcaccaaaccatacgactgtgtgacagcttcctacctgctgaacttcttaatctggcaggatgctctaccgtcatccttgtctgcctacttaactcagcaagttgcatgtgataatggagataggcctgctgctgtggtggaaaggaacacattaatgggtttgtattgatgtttgctcttatcaaaacgaatagcttagtctcagtattcatttggttagaatatctaatggttaaacatatattttgtggttttttatttaaaagtttatcagcatataagagcaccatgggttctcattatgcaaatgaacattttagtcagctataatacttttttctaaacagtggatttatgttgaataagtacatatacaaatatttattaataaagctcttttgaaatgagaatgacctctttctccaccaaaagtgtgcttttttccctacataaattatactgtgactagagacagaccatctttattgtttctatataggcggagttcctttttctgtcagggtttatgttttaattaactgtcatacccctgccttttactcttcccaaatagccagttccaaaacctagggtctgagattattcagatctagtgattttcaacaaatatttattggggattcatgtacttaattttatgctagtcagtcttcattttagaattgtactagaaataaggacagataaggatttttttttaataggaaaagggagatcagatatagaaagagagttaaaaattattatttccaggatggtagaaacagccatgaaaaagagaactagtaatgggagaaaaagaggaggccatgggtagttctggtgggaatatggccagagatctggagatagagaggtgacagtaccatggaggatgatgcttgcctacttgaattgcttcatagctggatttcaaaggagaccctattgagacagtgggaagaggactgcaattgaggtgaatagggaatgcatgcttcacataaaggctttcaattcaagacattttaggactttatgagatatttcaaacatacaaagaatgtttaaatatagacggcttaaaaaacatatatatatatatacatgtaatatatataaataatatgtaaaaagttcacaagttttattcacaagctaggtgatcacacttaccttaagtcatacaataacactcatatctttgaagcctttcctttatcctggctgtattttatattaatttttatcttcttttttttaataatattgcctctggtgtatatattattatatattattcagttttacatgatactgaattttctcagtagtacttactgtatatattgtacagatttaccacaatttatgaatccgttctcctgttgatggactttttctcctaaataaataatgccagtgtaaacattcttatgtagatcttttacatataggttgagcatccgtaatccaacacctgaaatggtccaaaatccaaagctttttgagtaccaacatgacactcaaaggaaatgcacattggagcattttggattttggattttcacatttggggtgttcaaagtatgatgcagatattccaaaatctgaaaaaatataaaatctgaaacgcttatggtcccaagcatttcagataaggagtacttagcctgtatattaatatcttctaatgcacatgtctaagagtttatggtaaacaaatggaataacctggtcacaaagtatgtgcatcttgaactttatgagatgatgccaagtaggcttttaaattacactctcaccaacaaattctgagacttgtattgcatcacatcatcaccataatttgctattgtcagattttaaaaatttatataatataaaacgatatctcattgtggtttcatcttacatttttctgattactaatacaattattttttcccatgtttacaagccatttacttttccccttcagtgcaatgcctgtcgatgtcctttgtccagtttttctgtagggttgtttgtctttttcttattgatttttaggagttcttttatatgttctgaataataatttactgtttttaccaaatctaatatttagaatataaccttctccttccaaggcgttgaggggagatgtctgttatactggtataactggacatgtacatgcaagagaatgaaattagattcactaccttatgccatatacaaaagctagctcaaaataaataaaagacttaaatataagagctaaaactataaaattcttggaagaaaacatagatgtcagtcattgtgatcttgggttaaccaatggttagttatgacttccaaagtacaagccacaaagggaaacaaaagataaattggacttcatcaaaatttaaaactattgtatgtgaaaggatgccattaagaaattgaaaaagcctgaaaaatggggtatttgcaaatcctatgtctgataagggacttttgtctagtatatataaagaacttgtacaactcactaataaaaggacataaccacattttacaattggacaaagaatctgaatagacatttttccaaagaagatatacacatgaacaatgagcacattaaaaagtgctcaacatcaaaagcctttacagaaatgcaaatcaaaatcacagtgaggaagcacttcacatcccataggatgactgtaatttaaaaaagagatgataacaagcattgatgaggatgtagagaaagtggaacccgcatagactgttggtgggattgtaaaatgctgtatctgctttggaaaatagtctggcagttcctcaaaaggctaaacatagagttaccatgtgaccctgcagttccactcttaggcattgtcttagctcgagctgctataacaaaatgccatagactaagtggcttaaacacagacctttattctcataattttagaggcagagaattccaatatcaagtttccagctcctgataaggggcctctttttgactctcagatggccatgttgctgtgtgctcacatggcaggaagagagagcaagctctggcctttgttcttttaaggacactaatcccattatgagggtcctaacctcatgacttaatctaaacctaattaccttccaaggtctccatcttcgattatcacattagggattagggcttcaaaataccaatattggggtgggggaggaagcacaaacatgtagtccataacaaggatatacctaagagaaatgaaaacatacatctaaacaaaaacttgtacaagaatgtttatagcaacattatttgtaatagccaaaaagtgggaacaatctacgtctgtcaacagatgaatggataaataaaatgtggtatatccatgtggtatggctatacagtgagctattattcatctataggaaggaatgaagtattgatacatgctgcagcatggatgaactttgcaaacattatgctaagtgaaaagccagtttcaaaagatcgcatattgtatgattctatttatatgagacgtccaggcaactagtttattttctgtctatagatttgcctactctggacgtatcataaatggaatcatacaatatgtgatcctctagggctggagaagggtagaggtgcaaggagagcagtgactgctaacgggtaagttttcttttttttttttcgtttggtggcaggagggcagtgaaaatgttctaaaattaattatggtgatggttgtacatatgtgactaataaaaactattgtatacttcaaatgtatgaattttgtggcatatgaattacatctcagaaaagctgttcttttttttcttttttaatttgaaagccatctgctgtccaattagcacatgccacatcagcctggggtttgataccctagtgagaggatgtttaggaggaaggactaagagtgaatgctgtaatggatacaggcagtttagggaaggacactcagttctgcctagaaatgagccaccctgttggataaccctgaaagatctctttttgattaaaaaactctagtgtaaagttcatttgagttggccatattaatgggaactattttgctgttcgtacatttacaaatgttttaagattgacattactttgattttctgtttgctttttctagttatcaaatgcttgatggaaaatcttgaggaagaagtatctcaggctgaaaattctctgcttcaggcagcagcagcatttccaatgtatgggcgagtccactgtataacaggagctttgcagaagttatctctaaagtaaggatttccacagctgcctcctgtctcagaaatccattcatttctgagctttaacctctggttggaatgtgtcctgggaaaggaatgcagtctattgctttgaataaaattgaaaatcagatttaaaaacatacgtatctgtgtatatttttatgtctcacatgttttatgtattgaacaattttgaaacacaaagtcaatccttttatctaattttcatttttaaaatgtgatttttgcttttagtataaatttccctaatgtccttgttgcagcagcctgcagttggtgagcgagtggagacctgtggtagagaagctccttttgatgtcctacaggctttccactgtggtgtctccagtcattcagagctcatcccctgaaggcctcatcccaatggacactgattcaggttagcaaatgaagaaggccggctagagtgctgtggtttgattattatgtctttacctctttttttttttccccaagtatttctttggggagatataaaagctaagttgaggagaaaataattattattatttgtggtatttctgccttttagcaatagttttaactattaaaaagtagcaaaaaaaaaaaaaaaaaaattcccaaaccagaggatgagcacggtaccttctaccccagggtaacttgagttatataatactgtataagttgaacatcccaaatctgaaaattggaaatacaaaatgctccagattttgaaactttttgaacaccaatgggatgctcaaaagaaatgcttattggagcatctgtattttggattttcagattagggctcctcagccattaagtacaatgcagatattccaatattcaaaaaaataaattgagaacgtttttggtcccaggcatttcagataagggatgcttaacctgtgctaaaattgagtgttccttttaatacacagaaaaatcatgaaatatatttatgtttggtgttgaaataaagtttgtaaatgtattttagagtgcaaagagaggcttgtattagaaaaactgactgtatcataaacactcactgaaccatatgctgaaataccttgggctgataattaaggtaatgtggagttatgtgttttgcacagagaatattaggttttgttctttcctaaaaatgagttagaagattggtgatggttcacgatagtaagacacatttatttagcctgttgttagtctaaataccaaattattttatttaattaatttttttttggtagagatgggatcttcctgtgttgtgcaggctgctcttgtcaagcaatccttctgccttggcctcttaaagcattgggattacaggccttagccactgtgctggccttaaatactaaattttgtcgctttagattttctacttgagcagtgcataagaataaggaacatgcaatcttatagctaatatttgggtcagcaaagtacccatatattctggatgagaaatcttgaatatttctgttacctactgtgggtagatcctacagaggatgctaacattatctttattagtgaagagttttaaggtatcagttggtctcaaaaactgtctttgccccacagacttttccttcattctgcctgtctttttacctctggttgtcttcatttttgctgcttcttccctgtgttatctgccatacattctgaattgcatgaggaaagtctcccctgaaagctgtaaaattgaatggataggattcttaaaaatttattctctgatcttttcttggtctttgcgtggtttcttttggggtcattgttagtttttcatggctgttgaaatttatttttgacaaaattccaggaaggaacataagatgttgattgaatcatcatgatagtaatttgcgtgtttgtatttcccatagtacctaaatataagtcaaaataatagatgtacaataaataccggttcttcgatttgttaattgatttcagatgattaccaatggctagttttgaaaatctgagcctggctaactccttactacctacatccattcattccttcaactcatgttcctgaacctctgctgtgagccagtttctgttataggcactcgtcactcagtaatgaacaaagtgttgcattcatggagcttacatttcctaatccagtgagtgcttagggaataaaaatgaaacttaatgtaatatgaagactgtaaatcataattagaaagcagtatattacataatgtgtttcaaagttgtggagtcgttacgatattcctgtcctataaaagattgtttttgctgttgatgggtttttaaaaatgtctttttacctttctatctttaaactttgataccttgtattatgatggggaaataatctattttctattttttatatttatttatattttaaatcaaatattgatttttttctacttttctgttgcctgcttcatttttctttcatagagaaatagcctcttaaaactaaatttattgaagtttattgcacttctttgacatgattagcaccatatttgagatatttagacaacactaagaaaagcagtgtagatgacatggtggcctttgtcctgtggacagtttcagtgagttttttttgttgttatatttcagtctaaattgccatattttaaaaatgcactcaagcatcatgaaaactgtataaataattttcatattatccaccttgtgagtcccttctaataaagctgattattaagtattgaaaattatagattttttgagtaagcatccccaagggaaatctggcatgtgatgtgttactgggtttcatgtacgctcatttctttccctcagagtcagcaagccgcttacagatgattctgaatgagattcagcctcgagatactaatgattattttaaccaagccaaaatattgaaagaacatgatagctttgatatgaaggacttgaatgctagtgtggtgaatattgatacttctacagaaatcaaaggtaacttgtataaaatggatactgtaattcatgtttaagtaaccagtaaaatgtacagaatgccctttttatatggtaaattagaggttgcaaatctgtgcagaacatttctagaaaataaagttttttaaaaattttgttttgggaaagatttgggtttaggaatggatttataagacttttaccaggggggtggagccaagatggccgaataggaacagctccagtctacagctcccagcgggagtgacgcagaagacgggtgatttctgcatttccatctgaggtaccgggttcatctcactagggagtgccagacagtgggcgcaggacagtgggtgcagcgcaccatgcgcgagccgaagcagggcgaggcattgcctcacttgggaagcgcaaggggtcagggagttccctttcctagtcaaagaaaggggtgacagacggtacctggaaaatcgggtcactgccatcctaatactgcacttttccgacgggcttaaaaaacagcgcaccaggagattatatcccgcacctggctcagagggtcctacgcccacggagtctcgctgattgctagcacagcagtctgagatcaaactgcaaggcagcatcgaggctgggggaggggcgcccaccgttgcccaggcttgcttaggtaaacaaagcaggcaggaagctcgaactgggtggagcccaccacagctcaaggaggcctgcctgcctctgtaggctccacctctgggggcagggcacaaacaaacaaaaagacagcagtaacctctgcagacttaaatgtccctgtctgacagctttgaagagagcagcggttctcccagcacacagctggagatctgagaacgggcagactgcctcctcaagtgggtccctgacccctgaaccctgagcagcctaactgggaggcaccccccagtaggggcagactgacacctcacatggccgggtacccctctgagacaaaacttccagaggaacgatcagacagcagcattcgcggttcacaaaaatccgctgttctgcagccaccgctgctggtacccaggcaaacagggtctggagtggacctctagcaaactccaacagacctgcagctgagggtcctgtctgttagaaggaaaactaacaaacagaaaggacatccacaccaaaaacccatctgtacatcaccatcatcaaagaccaaaagtagataaaaccacaaagatggggaaaaaacagagcagaaaaactggaaactctaaaaagcagggtgcctttcctcctccaaaggaatgcagctcctcaccagcaacggaacaaagctggacgcagaatgactttgacttgttgagagaagaaggcttcagatgatcaaactactccaagctacaggaggaaattaaaaccaaaggcaaagaagttgaaaactttgaaaaaatttagacaaatgtataactagaataaccaatacagagaagtgcttaaaggagctgatggagctgaaagccaaggctcgagaactacgtgaagaatgcagaagcctcaggagccgatgcaatccactggaagaaagggtatcagtgatggaagatgaaatgaatgaaatgaagcgagaagggaggtttagagaaaaaagaataaaaagaaatgaacaaagcctccaagaaatatgggactatgtgaaaagaccaaatctatgtctgattggtgtacctgaaagtgacagggagaatggaaccaagttggaaaacactgcaggatattatccaggagaacttccccaatctagcaaggcaggccaacattcagattcaggaaatacagagaacgccacaaagataatccttgagaagagcaactccaagacagataattgtcagattcaccaaagttgaaatgaaggaaaaaatgttaagggcagccagagagaaaggtcgggttacccacaaagggaagcccgactaacagcggatctctcggcagaaactctataagccagaagagagtgggggccaatattcaacattcttaaagaaaagaattttcaacccagaatttcatatccagccaaactaagcttcataagtgaaggagaaataaaatactttacagacaagcaaatgctgagagattttgtcaccaccaggcctgccctaaaagagctcctgaaggaagcactaaacatggaaaggaacaaccggtaccagccactgcaaaatcatgccaaattgtaaagaccattgaggctaggaagaaactgcatcaactaacgagcaaaataaccagctaacatcataatgacaggatcaaattcacacataacaatattaactttaaatgtaaatggactaaatgctccaattgaaagacacaggctggcaaattggataaaagagtcaagacccatcagtgtgctgtattcaggaaacccatctcacgtgcagagacacacataggctcaaaataaaaggatggaggaagatctaccaagcaaatggaaaccaaaaaaaggcaggggttgcaatcctagtctcggataaaacagactttaaaccaacaaagatcaaaagagacaaagaaggccattacataatggtaaagggatcaattcaacaagaagagctcactattcctaaatatgtatgcacccaatgcaggagcacccagattcataaagcaagtcctgagtgacctacaaagagacttagactcccacacaataataatgggagactttaacaccccaccgtcaacattagacagatcaacgagacagaaagttaacaaggatatccaggaattgaactcagttctgcaccaagcggacctaatagacatgtacagaactctccaccccaaatcaacagaatatacatttttttcagcaccacaccacacctattccaaaattgaccacgtagtgggaagtaaagctctcctcagcaaatgtaaaagatcagacattataacaaactgtctctcagaccacagtgcaatcaaactagaactcaggattaagaaactcaaaaccactcaactacatggaaactgaacaacctgctcctgaatgactactgggtacataacgaaatgaaggcagaaataaagatgttctttgaaaccaacgagaacaaagacacaacataccagaatctctcggacacattcaaagcagtgtgtagagggaaatttgtagcactaaatgcccacaaggagaaagcagggaaaggatccaaaattgacaccctaacattcacaattaaaagaactaggaannnnnnnnnnnnnnnnnnnnnnnnnnnnnnnnnnnnnnnnnnnnnnnnnnnnnnnnnnnnnnnnnnnnnnnnnnnnnnnnnnnnnnnnnnnnnnnnnnnnnnnnnnnnnnnnnnnnnnnnnnnnnnnnnnnnnnnnnnnnnnnnnnnnnnnnnnnnnnnnnnnnnnnnnnnnnnnnnnnnnnnnnnnnnnnnnnnnnnnnnnnnnnnnnnnnnnnnnnnnnnnnnnnnnnnnnnnnnnnnnnnnnnnnnnnnnnnnnnnnnnnnnnnnnnnnnnnnnnnnnnnnnnnnnnnnnnnnnnnnnnnnnnnnnnnnnnnnnnnnnnnnnnnnnnnnnnnnnnnnnnnnnnnnnnnnnnnnnnnnnnnnnnnnnnnnnnnnnnnnnnnnnnnnnnnnnnnnnnnnnnnnnnnnnnnnnnnnnnnnnnnnnnnnnnnnnnnnnnnnnnnnnnnnnnnnnnnnnnnnnnnnnnnnnnnnnnnnnnnnnnnnnnnnnnnnnnnnnnnnnnnnnnnnnnnnnnnnnnnnnnnnnnnnnnnnnnnnnnnnnnnnnnnnnnnnnnnnnnnnnnnnnnnnnnnnnnnnnnnnnnnnnnnnnnnnnnnnnnnnnnnnnnnnnnnnnnnnnnnnnnnnnnnnnnnnnnnnnnnnnnnnnnnnnnnnnnnnnnnnnnnnnnnnnnnnnnnnnnnnnnnnnnnnnnnnnnnnnnnnnnnnnnnnnnnnnnnnnnnnnnnnnnnnnnnnnnnnnnnnnnnnnnnnnnnnnnnnnnnnnnnnnnnnnnnnnnnnnnnnnnnnnnnnnnnnnnnnnnnnnnnnnnnnnnnnnnnnnnnnnnnnnnnnnnnnnnnnnnnnnnnnnnnnnnnnnnnnnnnnnnnnnnnnnnnnnnnnnnnnnnnnnnnnnnnnnnnnnnnnnnnnnnnnnnnnnnnnnnnnnnnnnnnnnnnnnnnnnnnnnnnnnnnnnnnnnnnnnnnnnnnnnnnnnnnnnnnnnnnnnnnnnnnnnnnnnnnnnnnnnnnnnnnnnnnnnnnnnnnnnnnnnnnnnnnnnnnnnnnnnnnnnnnnnnnnnnnnnnnnnnnnnnnnnnnnnnnnnnnnnnnnnnnnnnnnnnnnnnnnnnnnnnnnnnnnnnnnnnnnnnnnnnnnnnnnnnnnnnnnnnnnnnnnnnnnnnnnnnnnnnnnnnnnnnnnnnnnnnnnnnnnnnnnnnnnnnnnnnnnnnnnnnnnnnnnnnnnnnnnnnnnnnnnnnnnnnnnnnnnnnnnnnnnnnnnnnnnnnnnnnnnnnnnnnnnnnnnnnnnnnnnnnnnnnnnnnnnnnnnnnnnnnnnnnnnnnnnnnnnnnnnnnnnnnnnnnnnnnnnnnnnnnnnnnnnnnnnnnnnnnnnnnnnnnnnnnnnnnnnnnnnnnnnnnnnnnnnnnnnnnnnnnnnnnnnnnnnnnnnnnnnnnnnnnnnnnnnnnnnnnnnnnnnnnnnnnnnnnnnnnnnnnnnnnnnnnnnnnnnnnnnnnnnnnnnnnnnnnnnnnnnnnnnnnnnnnnnnnnnnnnnnnnnnnnnnnnnnnnnnnnnnnnnnnnnnnnnnnnnnnnnnnnnnnnnnnnnnnnnnnnnnnnnnnnnnnnnnnnnnnnnnnnnnnnnnnnnnnnnnnnnnnnnnnnnnnnnnnnnnnnnnnnnnnnnnnnnnnnnnnnnnnnnnnnnnnnnnnnnnnnnnnnnnnnnnnnnnnnnnnnnnnnnnnnnnnnnnnnnnnnnnnnnnnnnnnnnnnnnnnnnnnnnnnnnnnnnnnnnnnnnnnnnnnnnnnnnnnnnnnnnnnnnnnnnnnnnnnnnnnnnnnnnnnnnnnnnnnnnnnnnnnnnnnnnnnnnnnnnnnnnnnnnnnnnnnnnnnnnnnnnnnnnnnnnnnnnnnnnnnnnnnnnnnnnnnnnnnnnnnnnnnnnnnnnnnnnnnnnnnnnnnnnnnnnnnnnnnnnnnnnnnnnnnnnnnnnnnnnnnnnnnnnnnnnnnnnnnnnnnnnnnnnnnnnnnnnnnnnnnnnnnnnnnnnnnnnnnnnnnnnnnnnnnnnnnnnnnnnnnnnnnnnnnnnnnnnnnnnnnnnnnnnnnnnnnnnnnnnnnnnnnnnnnnnnnnnnnnnnnnnnnnnnnnnnnnnnnnnnnnnnnnnnnnnnnnnnnnnnnnnnnnnnnnnnnnnnnnnnnnnnnnnnnnnnnnnnnnnnnnnnnnnnnnnnnnnnnnnnnnnnnnnnnnnnnnnnnnnnnnnnnnnnnnnnnnnnnnnnnnnnnnnnnnnnnnnnnnnnnnnnnnnnnnnnnnnnnnnnnnnnnnnnnnnnnnnnnnnnnnnnnnnnnnnnnnnnnnnnnnnnnnnnnnnnnnnnnnnnnnnnnnnnnnnnnnnnnnnnnnnnnnnnnnnnnnnnnnnnnnnnnnnnnnnnnnnnnnnnnnnnnnnnnnnnnnnnnnnnnnnnnnnnnnnnnnnnnnnnnnnnnnnnnnnnnnnnnnnnnnnnnnnnnnnnnnnnnnnnnnnnnnnnnnnnnnnnnnnnnnnnnnnnnnnnnnnnnnnnnnnnnnnnnnnnnnnnnnnnnnnnnnnnnnnnnnnnnnnnnnnnnnnnnnnnnnnnnnnnnnnnnnnnnnnnnnnnnnnnnnnnnnnnnnnnnnnnnnnnnnnnnnnnnnnnnnnnnnnnnnntctcactcataggtgggaattgaacaatgagaacacatgggcacaggaaggggaacatcacactctggggactgttgtggggtggggggaggggggaggagggagggatagcttttaggagatatacctaatgctaaatgagtagttaatgggtgcagcacaccagcatggcacatgtatacatatgtaactaacctgcacattgtgcacatgtaccctaaaacttaaagtataataataataaaattaaattaaattaaagaagactttcaccagcctattaggtgctgttgtgcagcgaacaagctgttagaacagaaagccttggagtgataaaacctgccttgacagcccaggtgatataagagcagtgctatataatgaacctgggtttgggcagcaatcaacttctcccagcaatgtggttcattgtctgctgtgagagttcttaaagtcaagcaggcttttaaaggaaacaaaccttattagtaaaatgggagctgctttgttgtgtcaagcttccagaattcgagttcttacatcttgtttgatcattagttgttactgaattttctgcagtgctgtaaaacgtcatcagaagcagcaatttcttagtgatgtattacatattctacattctccactaggtggggatattgtcttgcaaaaaattatctccacacttaaatttttaaattacacaaaataatgtataaatgtaattatagcctattgtaatagtttcaaacaacagaggtacatatgaattaaaaacaaattaaattcctccaaggtttcctctccaattccatgtcttccttctttagtgcaatatattattttgtacttattttatatatttatgtgtatgtacacttacccatttaatgcattgggctttttaaataaaaacacaaatgaggttaccctataagtaccattttgtcagcgtgctcttttatttaatataatagttcatcttggattttaaaaaaatatcagtaccaaaaatactcctaaaactagaataagagagtaagtaaggctaattatagcttattggccatgggaattaaatatattttgaaagataatttgtattttcctttgattttaaaagttatattctactcctttactaatgcaacagtcatgctcaccaaaataaataaggagtgtatttattatagtcatccatatcatactttatgacagagaggcagagtttgtttaatctttggaaattaaagattaaacaagttttggaacaatattgtgttttattttaaaatttaatttgaaaataataaattaaaatactgggcctggcatggtggctcatgtctataatcccagcactttgggaggcccaagcgagagaattgctttagtccaggaggtgatgtggtgaaaccctgtctttacaaaaaaatacaaaaattaactgggtgtggtggcgcatacctgtagtcccagctactagggaggctgaagtagaaggattgcatgagcctgggaggtcaaggctgcagtgagccatgagcatgctactgcaccccagcctgggtgacagagcgagaccctgtctccaaaaaagaaaaaaaaaaaaacttagcatgatttcttctcataacacatgctcgacaaatgttagcttctttccttctgagtaaatataacatgacaaatcgggtttgttcaagcagattattcttggggaaattatgaataagcttgtttttagaaacctgggatatgagtaatcaaggttgcaatcgttgtgtttttttttgtttaaggtaaagaagtaaaaacatgtgatgtaactgcgcagatggtgctggtatgttgttggagaagtatgaaggaagttgctttacttttaggcatgttgtgccagcttctgcccatgcagcctgtgccagaatcttctgatggattattgacggtggagcaggtaaggcacatgtttattccaccatgtataatttctggtcaacgcataaatcacttttttttttataacccaactctaaaaaaaggtttaaaatttttcttgaataaaatcatacaaatgttaactgaagaaagttcatggtaatttagaatgttagactttataatacatttcaaaactgtggcatttttagaaattttttctaaggtatataaataactgtagattttacctcacttttaactgtagttttatctctaatttttatttctccatttcacatacacagacttaaactttagcttaaaattgtcttatttagtaaaactccacaaatctcttaaattttggaaagaaaaaaagtaacatgttggttgattatggatctcatgtttcccactgcattgataataaagttgtagtcttggtttttttggctgacttttgttttaagaccacaaagttagttcaccatctgggactgttcaagtgacttgagtgcggtgtttacaagaagttagcttaccacaagcatttcatttggaaatattttagatttattagatttctgtttttaattgattccctcttcctttccatatggttttgacaaatccatttcccaccatttttcagcaaagatatataacatgtactttcatttttaactttttaaaaataaaggcaactttttccctagggtgttacaattcaagaacaaaacaaatattgtagtatgctaatgctgattatttctataataaccacatgactagttccatggaaataatgctaatactttttttctcacactctgtggcttatgttgcatgcatctggttaacagctgcgcttgtgatgttgcaaggccttgagatgaagaaaggcaaaggcgcacaggacatttcaggcatcattatgttccttattctcttccaaatcaaataggcgtcagtgtcctagagttacttgcagtcattgctggtgactggctgtagtgccaatgccaacatctttgctgaggaatccagctatgattaatgattacttcactgatgttcaccatcttgctaagaagtaaacatgtgctagaggcctttgatttcccaacttctctttccaaggacaagttaaaacatttagttttttgggtttgttgggtagtgtttaaaaaacaaattaagggaagtgtattttgcttttactgtaactaagacgtgaaagcttcctatgaacattattttgccttgacactttttacatagcacccaaatcttatgtatttaatttgtgtgcgacagccgtgttaaaattgggaattaatgtaaaataagagatgtttgttaaaaaaaaaaacaattatcacaaaaagacaggttcttataaaccaaagaattcttccagtgactgcttaaataaaaaataagatcctgactgtttttctgtaaaacattagtttccgttgtaatgaggtccagtcatttttctatgttgccattcacatggtaacctcacatacataggcgtgagaagaaactgatgactgaatgagcgatgaactgtatatgtaatagcagtgttctaacactggaaccccgtcccctatgaaaaacttgattcttcgtattgctgactttagctaaagaaatgtctcagtttaggagtcaataaaaatccaaagtcatcaagaaattagtgttatttacattactggagaattcctgcttttaaacataaccttttgccccatgaacttcctttaaattaataataattaaatatacttacatgtgcttaaaacctttaagagttaaaaatataaatgacagagaagaacatcatttacattggaatggctgggccacacctgaggtacacccttccaagagcatagttgccctggcaaagctagatctgtgcctagtggtaaaactatgagtttaagagtcaagccttaggtgaatgtgactgccgtctgaatacacggaggcagtgaagtgacttgcaggcagaatgcaaccctagttagaggggagaatgtggaacttgcatttcttattcttcagagtagtaactgtgatctacttttctctcaatggatgaagaaagccattccatacagtctaaaatacaattctattctattttgaaatttgatgacttgaatgtagatgacagtccgtttaaaatcatcctgattttacagctccttgtttaaaccggtggccacttaaatcccccatataggagtataaaaggtagggagattacagtttggggttttttgttgctgtgtggggagaagaaatggggcttgtttataattctgagttttcagtgatatattcacaaaccattagagctggaaggatcatagagatgatattatccagctctcttggacaagaggaagctgaaccctggatgttacctggtttgcccaagattgcaaagctagtttgtggcagctctggaacaggaacccagttcttctccttgccagcctgtgttctgacatggcacagtgctgcctttgtgagctgctcatttaatttttctttaagtttaattttctgtatttcccatatccaggtaaattttcgcaagcaacaggacagtaagatgacttgctactgaactttttcttaaatgattgattccctagagcacttcctgtgaagcagtgtgctgtcaccagtttctccaggaggaaaatgtgttcattcagaggcatgtctgactttcctccttcactgtaatcacataatgaaaggttctttcatagtgttcctgtacaagaggcagagataaaaccaactttgagggatgtaagtggagacccttcaagagtaagcagtacacacaaccttatctcacaacttcctgactagttgatgtgtgtggagttttcaaacttgatgttttgctgatgtagagcttttgcttgttatattttgttggttctcttttcatgggctatctgatacccagtgcctactgattttttaaaacagcttcctccacctggagtactatatgaacttaagtttatatgtatttccctaatattcttaaaaagaaactactaggtagatttttcattcatgctttccctctgcagtaattatcgccacagaaatcacacgagtaagattgccaactattagaaattgctattttaaaacattcttttttagtttagtttttttttttttttttgagtctgggtcccattctggcgcccaagctagagtgctgtggttccattttgactcacttcagcctcaacctcctgggcttaagcctcccaaatatttgggactataggtgtgtgctaccactcctggctaatttttgtagagacgggatctcaccatgttgccaggctggttttgaattcctggactaaagcgatcctcccacctcagcctcccaaagggctaagattacaggcatgagctaccatgcccggtctaaaaattgtatgttagattctgttgtaacttttatgatgcccagagttaactacattgatgtattccctcagtagtgtcttttgttattactttagattttctgtaatgaactacaaatgggatatatgtttattcacaagtcttaaattgctttttgtattttcttttgccaaagtttattttttagaaattacaaataatttcattgaattgcactcaatgcaagttcccatttttaagctttgaaatgaagttgtgcatgtaaccacatcctatttattgactgccttactacaaggatatcgtgggaaaataaagaagtacatagtatgtggttctgtgacgtcaaagggcttagaaatacaatagaggataccagacagaaattcattttaaaaagtcagactacagggcaacagttaacattgcccatggttaagaatttgctagaaagcaaagaataaacattctggtaagatgatatctgagtggtagaaaattattacctttgttgttttgtaggagaacagtgtttgagctttgaagaaatcccaaaagttagtaacaaatcactgtaggagagaaggtacagtttaaaacattaactgttttactggagtgtaaacttttgtaaaacatcccgtttaaccaaagtgaaattagaagtggctgtgtcttaaagtcagaattcaaattaaggcttagggattaaggctcactactttatagtataaaataaaaataaaatggacatttactgtttgctactctttgccaggtactctgataaacacttaaatgcataatcttattatttatttctcacaataatcctgtgaagtaggttctagtgttagctccatttcacaagtaaaagaactgtgtttaattactttgcgttagtagtacatttcagaatttaccttctctagataaagggtagatttaaaatatatttatattttttttaatgggttttatgctttagatgagcatttagatcccctaattagtctgttggtgaattatacctgcctggaaacatggcatgtagcttcttcccctgtggaaatttataccctgtgagtccataaaacatgttaatttccctatagagatactttttatgaaaagttaagagcaggatatgctaattttaaaaagacaagtgattagaatttaaatttctgttctttaaattttaagaacagaaatcactgtatttttctttcactttgatcttaatttcctttataaaaatcctgagatgtatgttattaaaaattattttgctggaggtaacatactaccagacttcaaaatatactacaaacctgtagcaacaaaaaagtgtggtactggtgtacaaacagacacatagaccagtggaacagaatagagaacccagaaattaatgtatctaccgccaactgattttcgataaaggctccacgaactctcattgggtaaaggactgtccaataaacggtgctgggaaaactgagtatgctttcttcatatgcagaaggatgaaactagacccacctctcactctatacaaaaatcaactcaaaatgaataggctgggcacggtgggtcatgcctgtaatcccagcactttgggaggctgaggcgggcggatcaagaggtcaagaaaccaagaccatcctagccaacatggtaaaaccccgtctctattaaaaatacaaaaattagctgggcgtgtggtgtgcacctgtagtcccagccactcgagaggctgaggcaggagaatcgcttgaacccaggaggcagagatcgcaccactgcactccagcctggtgacagagcgagtgtcagtctcaaaaacaaacaaaaacaaaaaacagaaattaactcaaaatggataaaagaccttcaaaacaataaatggtaaagactactataaaactacttgaatagtggtatttattcaggacattgatctgggaaaagattttttctttttttttttttttttttttttttgagtctcgctgtgtcgcccaggcttgagtgcagtggcgctgtctcgggtttaaatgaacctctgcctcctggcttcaaacgattctcctgcctcagcctcccaagtagcttcgattacaagcatgtgccaccctgcctggctaatttttgtatttttttagtagagatgggatttcaccatgttggccagactggtctcagactcctgacctcaggtgatctgcccgacgtggactcccaaaatgctaggattacaggcgtgagccaccgcctggcctgggaaaacatttttataaataagacctcaaaagcatagacaacaaaaagtaagtgggattatatcaaactaaaaaccttctgcacagcaaaggaaacaacagagccaaaagataaacttcagaatgggagaaaaaaatttgtaaactattcatctgacaggattaatgtccaaaatgtacagggacctcaaacatctcaacagcaaaaaaaaaaaaaaaaaaaaaaaaaggacaaatgatctgaacagacatttctcaaaaacagaaatgacgaacaaatatatgaaaaaatgttcaacatcacaaatcagggaaatgcaaatcaaaaccacaatgagatatcatttcattccagttaggatggctgttcccaaaaagacaaaaaaataacaaatgatggcaggaatgtggagaaaagggaactcttacaccctattggtgggagtgtaaactagtatagctactgtggagaacagtgtggagattcctctaaaaactacacatagaaataccgtatgatccagcaatcccactactaggcatttatccaaggagaaggaaatcagtatattgaagagatagagtgctgcaaccccttgattgaatagtgttgcaatcccatgtttattgcagcactattcaaaatacacaaggtacgtaatcaacctgggtgtccaacaacagatgaatgggtaaagaaatgtggtgtatatatacagagtggaatactattcagccataataaagaatgaaatactgtcattcgcagctacatggatggaactggaggacattatgttaagtgaaataagccaggaacagaaaattaagcactgcatgttctcacacatgtggaagttgaactcgaagtaaaaattagagcagaggatactacaggctgggaagagtagttgagagggtggagataggtagagttgtgaaaggataccaaattacagctacataggaagaataagctctagtgttctttaccacagtaggatgactatagtttgcaataatatatatatattaataattccaaatagctagaagcaggatgttgaatgttcctaacacaaagaaatgataagtgtttgaaatgatggataagctgattattctgatctgatcactatttattatatgtattgaaacattactgtgtaccccataaatatggataattatttgtcaatgaaaaagaatttttaaaaatgctttaaaaaatctgtcttcataaaagggtttacatgtctttattatttcaaggtgcattttaatttttgatgttattgtaaatccatctttataaaaaatacatatttgaactttatcttgctgggctataaaaatacaactgctttttaaatatttatcttatattcatccatattactaaactctattattttaatcatttgtggattatttgtagattatatgtccataatgtcacctgcaaacaagagttttttgttttaaatttttattttactttaagttctgggagacatgtgctgaacgtgaggtttgttacgtaggtatacatgtgccacggtggtttgctgcacctatcaacctgtcatctaggttttaagccccgcatgcattagatatttgtcctaatgctctccctccccttgccctccacccaacgacaggccctgatgtgtgatgttcccctccctgtgtccatgtgttctcattgttcaactcccacttatgaatgagaacatgtggtgtttgattttttgttcctgtgttagtttgctgaggatgatggcttccagcttcatccaagtccctgcaaaggacatgaactcattctttttttgtggctgtatggtattccatggtgtatatgtgccacattttctttagccagtctatcattgatgggcatttgggttggttccaagtctttgctattgtaaatggtgctgcagtaaacatatgtgtgcatgtgtctttatagtagaatgatttataatcctttgggtacatacccagtaatgggattgctgggtcaaatgttatttctagttctagatccttgaggaatcgccacactgtcttccacaactgttgaactaatttacactcccaccaacagtgtaaaagtgtttctatttctccacatcctctccagcatctgttgtttccagactttttaatgattaccattctaactggcatgagatggtatctcattgtggttttgatttgcatttctctaatgaccagtgatgatgagcttttttcatatatttgttagctgcataaatatcttcttttgagaagtgtctgtttatatcctttgcccactttttgatggggtggtttgtttttttcttgtaaatttttttatgttccttgcagattctggatattagacctttgtcagatggatagattgcaaaaattttctcccattgtgtaggttgtctgttcactctgatgatagtttcttttgctgagcagaagctctttaattagatcctacttgtcagttttggcttttgtcgcagttgcttttggtgttttagtcaagaagtctttgcccatgcctatgtcgtgaatggtattgcctaggttttcttctagggtttttatggttttgtttctttctcttgcctgattgctctggccaaaacttccaatactatgttgaataggagtggtgagagagggcatacttgtcttgtgccggttttcaaagggaatgctttcagcttttgcccattcagtgtgatattggctatgggtttgtcataaatagctcttattattttgagatatgttccatcaatacctagtttattgagagtttttagcatgaaggggtattgaattttatcgaaggccttttctacatttattgagataatcatgtggtttttgtcattggttctgcttacgtgatggatcacgtttattgatttgtgtatgttgaaccatccttttttttttttttttttttttgaggtggagtctcactctgttgaccaggctggagtgcagtggcacaatcttggctcactgcaacctctgcctcccgggttcaaacgggtctcctgcctcagcctcccaagtagctgggactacaggcgcatggtgccactcccggctagtattttgtattttagtagagacgggggttttactgtgttgtccaggctggactcgaactcctgagctcaggcaatccaccagcctcagcctcccaaagtgctggcattacaggcatgagccaccgtgcctggcctctttcatattttttttacacttttcatttcttcttattttagtgtgctggataggggctccagaacagaattcagtagaagttgtgacagtaggaacccttatcttgttcctgattttaaagaggattaaaaaaaaacacacaccaaaaaaaaaaccctacactgttgtctgtgatgtttgcctattgggtttttataggtattctttatgatgttaaggaagtttttgtctcttccaagtttgctaagaggtttttttaaaaaaattatgagtcgaaaaaaaggaaaagactagaaagaaatgcaataaaaattaatagttacctctaaaaaattattttgtacatccattatccattttgtgaaccttaaatagaaactcagtggtatctaataggcaattgagttggagttttcagaggttttcattttaaagtgaaaattcagagattttcattttaaaaatcaaattttgaaattgtttctgattttgttgttattaattttgtaagtggtttgagttaagtctgtttcatgtagtctgattatccactgggaggctgtcagcctggtgtgtttcttctctgttcagctgctcatggactacactgccaagcccactagtcatttgtaatcggattcttctcttccttgtagccttgtccttactgttttctagcacgaaacctctaggtcactcagccaggtttacttacccttgtctgtgtatgctcattcattgatatgaaaagacctagcaaagtatctggcaggtagctggcacgcacttatttagtgttggtctattcattctagtctcccagcctcttctcatgttaattaccctctttcattttggtccacccaagtactgtaatagcctgttcaagttctggatgtgaagtgttttctcattattccagtgcaaaaggatctttcattttttggaacttatgcttctaatggacaccagacagcatgttggttttctttgccaaagtgaactaaaagcctgctgaggacaggcatcttgttttcatcttttctatctaccacagcattaagctgtgaagcattttacatggtgctaaagaaagactgttatctaacaggaattttacattatcttcaaaaggaaaaaagataataagcctaggtattagctatgtgggtttattcggaaattattaagtgcaaaatgaaaggaaaaactgcctatatctcagttttgtccttagaacatcaatctgttttctgtgcccaggaatacctagggttgaggtccatccttgagaagaccacccactggtcatacttctgaggtctttgatttttattatatgctttttgttttagacctcttcgaagggagtttgaataaaggaagcaatgaaaatctgatgtttgcctaaggagtaaattatgaactgttgtaaatccacagagaagcactttgtcagtaatgacaaagtttatgttttcctgaagtatgttttaatatctgcaacattttgggaaaaaaattaaggaagttagagaaacctcatctcattgactttctgtttttattttctgtctttaagtaccttcttagaaatctcttgtttctctaataatcgaaatgatggtcattacaaataagctaactggtggttcttctagtccttattttgtattagtattatttttttaagctggctatcatgagttacttattttataggattatcgggcttcagccctattttaggggtttaattcggatttaagccttgataattctgttcaaacaatgctctgaaattaccacattgaagacaaaataaggcttacctgactgtggctcttgacaactggtagtatgtggtctttaaaagatactaaaatcaagagtatcatcagatctttacaggaaaactaactgaagaacatgacctgtcactctttgggatactaaagagttagaattttttttaaaaaaattattatatactgcttttttggttctttgttagtctcctatctgattcttgtttctccatgtgtatcacttattatatctttataatcagatgtactttgagtgtggattacgtctttagttttcctctatttagaaccctagtcagaactcatattgaactgaattggattataggttctgggcctgttctgagcttttcagtttattacttattttaatacaacaacctgtgtcctaaatactggtattatctctagtttatggatgaggaaactgagatacttgcccatgatgacatgtttaactacttattctactgtttatcatctctaatgtgtgcagaatactaatctagtccctatgctgagataggaggtgtttctaggtaagcatatctgagatatcttgggacaacttgtcttttaccatcctgtgatctgttggggagacctggatcaagagatagctggttacagctttggtcctgagttttatacaaaatcttgatttttaaaagacaatagttactaaatctaatggtataaaagcctaatcagcttaaaagttaattctattcaaaaccttagtcaacaatgaattgtccgttttgttttctttaaaataaataatctggccggccacagtggttcatgcctgtagttaacagctactcgggaggctgatgcagaaggactccttggggcccaagagttggagactgtagtgcacagtgatcacacctgtgaatagccactgtacttaagccgaggcaacatagcaagaccctgtctctacaaaaaattaaaaaattaggtgggtttggtgacatacacttacagtcctagctgctcaggaggctaaggtgggagtattactgtaacctcaaactccttgagcctaggagttcgaggttacagtgagctatgattgtgccactgcactccagcctgggtgataaagcaagaccagaccctgtttttttttttttaaaaaaagtcatatttgttatttgtctaatcttgtgtggagaaagacagcatgtaggaaagccactgggtgacattctggcaaattccatggttctgtcttgaagtgaagcctagtagtttttcaggaggtcctttgcaccacatcttgcattgtcattaacaattttatgtctctaaaaggtaatacgggttattttttaatgggtatggagtttccatttgggaagatgaaaagttctctaaatgcatgatggtgatggttgtacaaaagtatgaatgtacttatgccacttaattgtacatttaaaaagggttacaatgataaatattatgtatattttaccacaataaaaaagaaaaaaaattttaaaagaaggaaaaaaggtaattatttcacctagacctatgtgtgtgagtgttgtcgctttgtgtgattttctgttggagttgaataacatgagctataacagaaaacatactgaggtttgtgaatgtgacataggaaggcagttctagtgtagcagttaaagatggtcaactctggagccagactgcttggcttcatgttctggttccattgctttcttgctgtctgaccttggataagtttcttagcctttcttggcctcagttttccaattgtgaagtagagataatgatcgtacttatttcatggaattactgtgaggattagatgagctattgttaaaaaaaaatacttaaaatggctgggcacagtggctcacgcatgtaatcccagcactttgggagaccaaggtgggcagatcacctgaggtcaggagttagagaccagcctggccaacatggtgaaacccatctctactaaaaatacaaaaattagccaggcgtggtggcaggtgcctgtaatcccagctacttgggaggctgaggcaggagaatcacttgaacccaggaggtggaggttgcagtgagctgagactgtgccactgcactccagcctggacaacagagcaaaaatccatctcaaaaaaaaaaaaaaaaaaaaaagcttaaaacatgttctgtcatatggtaagcgctaaatgaatggacccctagacctgggttctaaacagtgttactgatataaatacacttgcgaatgtaaacataaatcggacatttgtttttgctttttttttaaaggtaaaagaaataggagattactttaaacaacaccttttgcagtccaggcacagaggagcatttgaattggcttatactggttttgtgaaactcactgaagtactaaacaggtaaaacaaatatccttttgtgtacgttttaaaaagactaaatatacaaagcatatgcttggagtagaatttagttgtgtcttttgaagtttaaaagaataagacctggttgactacaaaactcttggaagaaattgttttcttaggtttcattgtatgatttactgcagataactgattgaaacgtccaaactgagttattattctgtcattgaaaggtgatttgaagcaaactcaaagattttgctaaaaatagctttgaaattactgttttttttttattgaatgaaataaatgttttgtctgtttgaaaattacttggtgtttggaataaaacaggccttgcaatttttggggtttgtattacagaagcacttaaggattttggtttttttcttcataattttatcgtatagaaaagtttaaaagaacagtaagtagactgaaaagtagaaaatatttttttccttttacctggaaaactacttagatagatttcatatatttaaccaaatgtatttcttgacattatagttacagataatttcattcattcatataatagatttcctccaaagagcttgtggggaaaccttaaattacttaatgactaagtgttcatggcaagtgttctctaaataaaaggtagtattttccaggaaaacatttccattgcctggaaactttttgaaatgaagcagagttctgccagccttgtagcctcagcaaacattttattttaggctgttaagacatctattccttgaatatttttgaaactttttttttcacatgcctggtaaaaacatttataaaacattttggcagttatgggctgcacagaatgtctttaaatgatactttttaaaaagtccctgacattaaactgctgatgttgaaaatattttatcttttcaactttttgtttccagtgtagatatgacttatgaacttttttttccctcaaaacacaacacactccactcctatcaaatcagttaacaagaatgtatgaataccagcagtgtgcttagtactgtgcttggtttggatgatattatggtttttttataagatgaagttcctgttattaaagagcttatgttttagtttgagaaataagtagagatgaaattcaaaatatttaacaaaaggtatgttgtgagcactgactggtcagaaccaacactggctgtatacagcacccagcatctctctgtgtgtggatgtgtgtggactgattaccagcctggaagtaagaccgacacacttgaacaagataaaactgccaaattttgggtgaaatttataaaacatataggaatagcagagagagaaagcaatggggataggctggtagggcttcatggaagaggtggaatttgtgctaatgcatgagttgaaagaaggaaacattgtgagtaaatgttcagaggctagaatcagcaaggtgaataaataaacctccttcctgtagtggtggagttggtaggaaataaccaggcaagttgatagattgaggccaaattatagagtgtcttggaaatagatttactgtagcagggatggagagaggcatcaaacatttttgctctgaaatagatcataggaggcatcatagaatggaggaataccagtaatctgtgactctggttcttagttctgtgtatattcattccatttattggcaatgagattgtacaaaaattaacctccctaacctttgatctcttcatctttaaggaaaagggtatttgccctattgacagatctctggcttttgttgtatgaatcaaataaaatagatatttaagaagacctctttgcattatagaatttcctacaaatttaaaacatgagattgatgttggttgtggggttggcatgtaaaagcagttttctggttggaaatgttaggttagatagattgtaatacagattatagtaaggagagcctgcaatcagttataacaaagtagatctgaggtgatgagggcttcctcttgggtggtggctctgggaatagagacaaacatggggttttagttaacttttgtccccacatagatagtaacaactcctcacatgatgtatgcttagaaggaaagctgtggacacattttattacattcatggttttgtatctcaacaatttgggcagggctcagctgggtgattcttccttagggtatttactgagttcagttggtggcattcagctggcagatgaactggtcacaagggacctaagacaacttcactcgcatttatggcaccttggtgggactagctagaaggctgggcctagttgggactacatgtagcctctcaccccagcatggtagtcttggggttgaaattcttatatggcagcttgcttcccccagagagagtattccaagagaatcagccagaagctgtatgctcttttctgacccagccttggaagtctcattgcattgctttagtcacattcctttgattttaagtgcatcttaggaccagcctggattcagtctaccttttgacagcaaagtggcaagatcatattgtagaagtatacgcagataggagatgttgtggtagccatctttgaaaaacgccatctgccacatgaaccaactgaatgtgaatagtagaggttactagggagttcatggttgcttctgtgattctaagtcttggtcaccagacaaatggggttgatgttaacaaaacaaaggaagttgaaagagggaatggtttgataaagatgagtaagtttttttgttttttatgtgttgagtatgagataatgatggcataccctggtggaaatacttaagtcagatgttagagataggggattagtttgggtgatataacaaaaacagagatgtagatctgtgagttttctccaaaaatatcatagtaagattgcagtctttggtggagagcatgaaaggaaaaaagaacagaggtctaaggacagaggcttttgaataactgtggttgaatggtacagttgaaggcattccgaataaatggagcggggagactagggaatgcccaatgcctggtatcttagcccctcctaatctagtttaaagattttctcatggctgttactgttggcttttaaccaacctgttaggagttctcagctgttgctttcaaaccaagtagttcttgatccctttagagacatttcaaatctgctgaacagaatgttttgcagagaacatctttacagtgtgtgtggcttccttttgtttggtttttatttttaaaagaaaatttgtttcttttggagcccttttgagagcgttttataagcccttaagttatgaaaaagttgtttaggcatacaacatttaaaaagtttgcaaaaagaaatctgggcattcatgaaaatccacagaaatggaggccaactgctggccacctcttgaactacagctgtgttaaggaaggaagcacttaaagagattaatggataaataactgaagagttaaacatgacccacattgtttgaattggtttttaataggattatgcaaaatgtcttcaaatataaactgacttcactattaaacaatcatctaagaataaatagggatggagacattgttactttttctgggaatgttttgaaagcaacacttgcaacacacataacacaaatagtgtgttgagttaattttctgtaatctgatttttttatgtcgtgctttctatttagaagtcagtgaaatattcctgttctccttaaaaaacatcattgcttgcctgtgcataattacttgtctaagcatttgattggagtggttaagtttgttaatgtcataaaactctaaattcaactttttggtgacattcatatttgcttgtttactttctgtgatcttattatttgaagtcgttcttctgatgaaaatgaacagacttctaggatgttaagttgggaatccaactttaatttgtccaaccgtaagatacaaacttaactataaggggataaaatcattgattataattctaaatctagaagggagatttattagtgcttgatgttgtcttactcttcaaatattcgaattgctttacttgtaatgtagcttaatctacagatatttattgcagtaattataatcattttcacattattggcctgaaaaaattaaattgtgacatttagtagtttttgtcattaaatactagtactgactcatggacatcaacaattctgtggacagaaatcatttaaatatgtatttaaactttcatcagttaattatagctaccatgattcaaattcaacagaaaacttttgatgagcaatttaaatataatactgaaaaaataatttcttctacctttctggagaatgaaagaccaagtctctaaagaatatgcagttgagaaataaataaatgcagaatgtaatatataagatttggggaagagtcattcagctttgaatgaaagaatatacaatcttgtgtaaactttatttttaatttaatttatttatttgagacagaatctctctgttgccaaggctggagtgcagtggcatgatcttggctcattgcaacttctgcctcctggcttaagtgatcagaatctgtctcagcctcccaagtagctaggacttacgggtgtctgccaccatgcccagctaatttttgtattttttgtagagatggggtttcgccatgttgcttaggctggtctcgaactcctgggctcaagcagtatcccacctcagccttccaaagtgctgggattacggacatgagccaccgcgcccagcctaaacttttatttacatttcatttgggaaatgtgtctaaataagacactatttctcactgagtgtcctattaattttatttgaaatatgaataattaaataaagaataactaagagatgagccaccttggggagccatattcttttttttgttttgttttgttgagatggagtctcgctgtgttgcccaggctggactgcagtggcgcgatcttgcctggggagccatattctttatagagagaaaaatccttttaatttcccttttctattgtggattaaaagaatttggagaaaactagaatgtcttgatgtatacattctaagtgtttgttaatgattcctgcatttttattttcatttttaagcctactgtaatagttgagtcagatattactgtttttcctcgatatttgaacactcatttaaaaagttttcataataacactttgtcatttagacaatagcagagggactttgttctcagtgagtaacctctatgccagctttttaagtaaagttttagaatttttttaatattaatttttctccttgatcttagggaatgattatattaaataattgagagaaccagctatctggtacatcttccaatgacttcttttaatccactgtatcttgtccttctccccatggccctctgattggtaattcaatttagatttggtcattgtattattgcctgtgcctgcagctaagtcttcaaaatagccccctaatgttttagcctgcagtaagcctcaataatgtatgatagtggtgagggaggttaagatggcttctcttgatatgtagctttctaacaggatttcatttgggcaaatcatttttcaggcttaaagtttcctggtgcttcagggttgtgttcctatttaaaatatacatgcaaacaaccttcctgcacacatctattagtgtttagtttcattgaaataataaacatgaactttgaaataataaatataatacttgaccaaagattgaatggagttgaatgggaatttagcttatgaaataattagagattgggaaaatctctaagttagaaaaaataaatcatactgaaagagtttgaggaaatgaaggtgacatttctcagttagcaatagtaatataagttaaaaatagctctgtgctactacatgtagttggatggatgaagccatttaaaagccactttgtagtcagggaatcggatttattggtacaaaataattgtctaatgaccagttagttgggtatacagcttatgtaatttgattttagtctgcgggttttattcttatcttagaatacttatccagtgggagtgagatagctctgtggataggagttggagtaatctgtttatggaacaataatttgcttcagtgatctgctcaagacaatacaaaggcctgaatagcagctatagcctggcctgttcacttctgttacttttagtaggggcttaggccatagcacttagcataggaaaacagcaacaacaaaccccttaccttttttttgagctggagtcttgctctgtcgcccaggctggagtgcagtggtgcaatctcggctcactgcaacctctgtctcccgggttcaagtgaatctcccacctcagcctcccgagtagctgggattacaagagcaaaccaatatgccaggctaatttttttgtatttttatagagactgggtttcgccatgttggccaggccagtcttgaactcctgacctcaggtgatccacctgcctcggcctcccaaagtgctggattacaggagtgagccaccacgcccggccctccctacctctttttgtgcatctgcctgcctgcctgccttcttgtctgcctgccctcctgccctctttccttccctctttccttccttcttccctccctccctcctttccttcccttccttccctcccttccctaccttccctcccttccctaccttccctcccttccctctctttcctcccttcccttccttcccttcctatccttcccttccttctcttccttcccttccttcccttcattccttccctcccttccctcccttccctccctttcctccctttcctcccttcctccctcccttcctcccttccttcttccctccctccctccctccttccctttcttttttcttccctccctccctccttctttaagaatttctactcttcataccgtgctgctttctaggttctgattgggaaagtcaggattttggatataaaagactgagggaagctggatacatttttagtaagcttccttgagaactggtaaaccgtttgttgttgttgttgttgatatatatgtgtgtgtgtgtgtgtgtgtgtgtgtatatatatatacgtataaatatttgagatagggtcttactcttttgcctaggctggagcacagtggtgtgatattggctcattgcagcctcaacctcctgggctcaagcagtcctctcacctcagcttcctgagtagctgggactacaggtgtgcaccaccatgcctggctaatttctttgtattttttgtagagatgggcttgtgccgtgttgcccaggctggtctccaactcctgagatcaagagatcctccggccttggcttcccaaagtgttgggattacaagcatgagccaccgcgcctggccatattttgtagattaataacattttgtgttactgagttgtttatgatgaaccttgaaccccttttaagaaggttgcaattttacaatgtactcagaggctaaagacactgtatattttgtattaattcgacaagatagccaaataaaaacaaaataccttcagacaagaggctgtctgcttatttagtggaaaggcattcactaacaaaagcaggattttggaattccccatagctgtggttggtgactacatagagttggctcaaagaaccaaggactgtttcactcgagaacctttctttttatatccttgctaggccctggattgtgtgatgaagaaccaaaacaaacaactagggtttgctgtattgttcttgggaaccttgcatggtttcatttttacctctcaattccttcattatcataaacaccagcaaccctggagttttgaaatcacttccttataaagaaatctttccttgctggggagcagacagaaggttcattgaatagtcagaactctattctgctttttataggcacagtgacctcactattgagaagacttagggttccagctccctgctttttatacctggtttgtcaattttatgcctacctgcaggcacagctaatgtgcgccagctggcaccagcactagttgctccttaattattcaacaaaagatttcttaaacatctactgtgtgccagatgctgtgtttgactgagctctctttgaccattgagaatatgatatggtaggccacagttactgtgaacctagacataattaccagagtctaaataggaaacatataactgtggaagtaagagagggatgtgaggacttgaataagggactaaggattgtatgggaccatgatgaggagttttggggacattctcatcaggaactacttatgtattttagagtcattatcttctctatataacccagggaatgttcattgaattttcaaagcatttttattttattttcattctaaagcactgagaatcaagtgatttatctatagctacacatgtagttggtgattgagccagcactagaatctaaatgtttttctggaatttcatagcatttcagaggttagcagtttaacaaaagtttattgattattgctttctataaggaattgtgatagctaggataaaaatattgataaaacatgggccttgtttttagaggaactttcaacctagcattttaatctttgggattagataagtaagtcacataatttacaagacagacgttaaagaccaagacaaagatccgctcactgaactgtctatcctaggtgatgagaagaataattaatgccaataacattggcaaaaagcaaggcaagcaggagggcatgatgggagggagaataatgctttaaacatgctgagttaaaggtagttttgggaggctgcctagcgggatagcagacagttggaaatacaggtcaggagattagcagaggggtccaggttggagatagtgtgacctgggactcccccaatattttagcagtaaatgtccagcattctgggaaatcctttagtcccaggcaaatagggacagttgttcactccagctggaggtatatgtttgaaagtcagccaaacagaggaaatagatgaagctatgggcctagaggagatctcctaaagaggcttaagaaagaaaggaaaaagttatcatcttgaattaaattttataactattgttaaaactcagagacattgctcatatgaaacatagtttctactctgtgttcataagtgtacaaacctcggttaaataacacttttacatgaacctgaactatacttgcttttgaaccctgtacttggttttgttcttgggtcttagagaaaaaatgatctcttggggtagcagttaggttaatagagttgattttggtaagctgtttggggatttcagtaggaaatattcttgtatgaatactataaccctggtatgtggagatttgctgaatgtgtttgtacgtgttacaggaagctaagcagctgcatcaactgctggctcttaacagtggcacttctcattggaaaacatttttgtttgtactttcttttctagttattataccctctttctttgtcaacctggtttgttagactgccatattcaatgaagttagtaaattatatgtcattcatttattcaacaaatatttattgagctccctatagggtatcaggccgtgttataggtgctgggaatagagaaataacaggaaggaatgtgtccttgatacatggagatgtagaaaataataaactatctgctagcagtgtgtgtttttatgtgataaagtttggtggtaaggaagattctttcctactagactaaagtaatatttcagccagggcctgaatggcaagaagcagcaccttttctggagaagagctttccaagcaatgagaaccactaacgccaaaatctatggtgtattaaagaacagaatggtgtaagataaagtttaatgagattgtccagatacgtagggctttgtgagccaggatgagtttggattttttgctccctgggaaatctttgtgttttctgagagtctccaaccacatgtatataaaaatagaaggtatcttggaaatggtacacacattaatatttatggaccctagtaggtaacttcaagattacgagcaaatgaagtgcacgtgcgtttgatagagttgcatggaagcggggaggggactggatgaaaaaatgagaaacttcatggatgtgtaaaataaatggacataaagtttctgttcccagaaagtatactattcctttctaagctgccactttgttctttaacctaacaaagtgaaagtctgtgtttatgggaaagggaaaggattttcttccttcttgtgctttgtaagtaaactattgtttggtaaataaagatattggcagaggcttacccttactcagttgaggttatacaaattaccttcctggcagtttgagtcttttctgggaattttgcttcaatacgttggctttaaatgtacttcatatttaaatgtgaaattaattgctttgtgtttgcaggtgaagtaatttcttcaggctaccatgaatcattcagttaatataagaaagcagtttattaatagtaataaacttccccagttccctaagggagtgggggtacctcgaaaacaaatgagacacaattcaattcaagtcagtcacaaaaaggttatctactgagtggcttttctgtagagtattttaattttctagctagctctctattcatgtcacccagttcatttagaactattaatactttaacccccaccccaatggtagatgttcagggaatgaaatcaatctgaaaagtaacctgaataaaacatgatcaggaagttaatatcttaaaaattgtattctctggtaatacattccaaagccacatgaaaacattttgtaaatcacgtgccctttggaatttttattctgcggttctatttttaggacatagcatagtgcaaagcaaccactagctacctgatagatctctttaaaaaataaaatagtgaaattcactaaaacaaatattagagagttgatagtattttcatcatgagccagatctgagcatttagggcaggcacattgaaataatgcctttttattaggcaagggctttggtgtcaatatacattttaattctccctctgccacgtacttgctatgtaaccttgagcaaattatttagcttccgtctcttctacccccttattttacccaatttttaaacattagtgtgaaatatttgcatgtactagaaggtatagtgaatactaaaattagcagttgtacaaccacgatgtaaatacctggaggaagagtattcacggcagagagaatgtcaggtgaaaaagtcctgagaggcttgggcttagggtaggtatttaaggaacatcaggtaaaccaattatgactggagtagtgtgagcataggaaagagttgtagatgagatcagagaagttgtgaggactagacagcctaagacattgtgtaagaactttggcttttactctgagtaaaatggggagccattggagtgtttgtgaacagaggagtgacatgatctcatcttttaaaaggattactcttacttctgtgttgataatagactataatagtgaaaacagaaagaccgattagttacaatattgctatactacagaaaagagatagtgatgacttggaaagtggtggaggaagtaaaacgtgatctgaatctggatgtaacgtgaagatagagcaggcaaggtttgttgacagattagatttgctatttgagagagagagcataactacaaagtttttggcttgagcccctgaagagatcgatttgttattcttttattaggatgggcaagactgtgggtagagtaggtttttggaggaagatcaggagtttagtttggggcatgttaagtttggcatgtctagtagacaccccattgaaactactttaggtgtactttgttgaagtacatcctttagaatttcttttggtgagagtctctggaaggcagacttaatctttgtatatttcagattgtctttttcttacctatgcttttgaatgtactttaacggggtatacaattctggtggacagttgttttccttcactgcttttgttattgccagtgagaaacttgtgtttggtataattgatgttcctttgtagatctccagttttttttcctttaaatctcctgtggcttgtaagtttttttattaatcacaattttgctatgctttttccaggtatggaactatcgttatgtatatacacacacatactttatggttttttcattctgtatactgttttgggtaaatttcccagaaaactatcttctaagtcacgaattcgttagaattcatcttatctgttttatatgtgtgtgtgtatatatagtttatatatattatatataaaatattatatattatatattatatattatatataaaatattatatattatattatatattatatataaaatatataatatatataatattatatattatatataaaatgttatatattatatataaaatattatatattatatataaaatatacgtaaaatatatattatacataaaatatatattatacataaaatatatattatacatattatacataaaatatatattgtacatattattatatataaaatatatattgtacatattattatatataaaatatatattgtacatattattatatataaaatatatattatacatattatatataaaatattatatattatacatattatatataatatatatttatatatatattatatatattatatataatataatatattatatattattatatacaatatatatattatatataaaatatacatatatataaaatatataaaatatatataaaatatacatatataaaatatacatatatgttatgtatattatttatattgtgtataaaatatacatattatgtatattatatattatatataaaatatacgtatatattatgtatattatatatattatatattatatatatattttttaagacagggtctcactctgtcacccaggctggagtgccttggcatgatctcagctcactgcaacctctgcctcttgggctcaagcgatcctcccacctcagcctcccaagtagctgagactacaggcaagtgccaccatgcccagctaatttttgtatttttttgtagagatagtgtttcaccatgttgcccaggctggtctcaaactccagagctcacgtgatctgcctgcctcgtccttccaaagtgctgggattacaggcgtgagccaccgtgcttggctgaaagtacacttttatttctagtcttttttatttttatacatgcctgttcttatttcactacggcttgtttttcatgatttcttgttctttattttttttttttttaagggacagtgtctcactgtgtcatccacactggagtctagtggtgtcatcataactcactgtagccctgaattcctgggctcaagtgatcttcctgctttagcctcctgagttgctgagactacagatgtgagccaccatgcccagttaactcttcttaaatagaagttattcccttatttatcacttcagtatcctaaacatagttattttaaggtttttgtcagactgctccataaaattagtttcatatagagtgaatgtgtgttattactgatttttttaggttgtctttcttaatataaaatttatttctatattttgaattttggctcactggctatgatgggagccttttgtttactgatctctttctaggctctttcctctctatcagaggaactagattaggtagtggtattttgggtgtcccccttcacagtgaaattggggatatcatagatctagtcactgagttagtagtcagcctgattcagaggccccctgtgcccttggcttttcctactgctacagcctcaggcagctctggcagtagccctttttcaggttcttctcaaaagagatgaggctgctgaaattctttggctgccactactgcttctaaatctgtaactcttgggtctctggtatcagcacactcactactttgcatttctgttcatttttacccagatgattatcttgcttttggactcagctggttttggggtttctatttgtatattttgcatattgttaacattaacttgcattgtagggggatgtcctgtcaaaatggaaactcagctgtttcatctctatcatttcaattgaaacttttaatacttgcttttctcataataaccgatgattttagaaaatgaccattaagaacttattagacataagaacaaactcaatccttccaaaaactgtcattttatagaagagcaaagtgagaaaatggagaaatttagtaaattgccttggattgtacagctactaggtagcagagaaaggattctaaaccagataacacgggtccataatctgtgttcctaaccactgtgatatattccctctcatctgttagttgggaaaaataactttctcatagtttgttccaagaatgaagtaagagcagctgtgaaaagcctggtgtcgtaccagacgtgtaatagacatccaacgaatatttgtttttctttcctttgtggcaggcaaatatatttccagtatgatagtttaaataaaacttgtggccgggtgcggtggctcacgcctgtaatcccagcactttgggaggccgaggcaggcggatcacctgaggttgggagttcgagatcagcccgaccaacatggggaaaccccatctctactaaaaatacaaagttagctgggcgtggtggcccatgcctgtaatcccagctactcaggaggctgaggcaggagaatcacttgaatctgggaggcggaggttgcagtgaggcaagatcgcgccattgcactccaacctgggcaagaagagtgaaatttcgtctcaaaaacaaaacaaaacaaaaacaaacaaacaaaaaacttgtaagtagattttgtttaaaatgtagtatgtttaattttagtaaaaagggagggtggaagttccattattggaccaaattcccttgtatggctttgaggtcaggacttgcctgggagaggtgcagagctgagaagcaagggaatcagaggaatgggaaccggtggtagagttcacactggaaaccagataagtaaagaattctgcgtaaaagctggtttgatgctggggaattccagagcagaataagaaggtttggactagatggtaggagctggtgccttgagcatttcccagagctcatgaggttcctgggtccatggtgcagtgggcagagatggctctatcgatggcattttgccagccttgaccttgtagagcattcttctggcctctgttttcaaattctgcaaattaacaaggagcatttggttcttagtatgcaatactcaagggaataaataggcccagttcactgtttacagttatactagccaagtgtttaaattagggaattgcctctggggccttgacctagctctttccccagtcatctcatcttttacttcctcagctctcatatatggaccttccaccattcgacctacatgtccttcaaagtctagttcagattccagcccttccatgacactgtactgatcccatgtacgcctaatacctagtagttgcttcaagttaattggaagtttagagaaaggaaaagtcctcgtgagatgcagtatttggaggaagtttcatcagtttggatgaatagggatatgtgtggagaccataaacgaatgcttagttgggaatatgaggtgtgtgtgttgtatgttagtatgagaaccagcaaaaaacagtcttactagaccagaggagtttgtgtaggaacttggaaaagttaaggttagatttaagtaggagggttgggtccaggtcataggcaacctttcaagctaggagagtttgacaaagttagaagaggagttagatgatttggttaatagtcaagagccactgaaagttcatgcagggaagggtgatgcatagtgagatgttctactctcattccagacctgccttcttggagtggttggttttgccacagcctctgcgggctcactcagggaggcccaggggaggcccactgacagttgaggagcattattgaactagtatttagtgtatttgtatttcagcacacttaggaaattaaggaaataggaaagtacctctcatgtcctgcagttcgttcttccccttagtttttcctacgtagcaaatcccctacaggagacgaccttagactgtagcattatctataagctggttttaactttcccatggttctaggaagaaaatgcaagtataaattaagcccacagatattagatcaagtactctttaccttattcacctctataattccagcttcttttcttcttgggtagctaaatcaccaaaaaaaaatttttgcttttttttttttaaatttttttagttttttttgagatggagtcttgctgtgtcacccaggctagagtgcagtggcgccatcttggctcgctgcagtctctgcttcctgagttcaagcgattctcctgcttcagcctcccgagtagctgggattacaggtgcccgccaccacacctggctaatttttgtatttttagtagagatagggtttcatcatgttggccaaggtggtcttgaactcctgacctcaggtgatcctcccgcctcagcctcccaaaatgctgggattacaggtgtgagccactgtgctcacccggcccaatttttttttttttttttttttacagtgaagaaggaacaaaagaaggcagtaatctatatcattagcacttaagtaattactcttaggaatttggatttcagtttttgattggtcaactgtgtgaggattatatcaagctggcaatattattaatagagaaattatttcacaaaacacaagacatttatcttaatttaaaaagatataaaatctagtgcttgggaagtaacctcaatccttaaaaatacaaaagtgtggggcaattattttcattatgaaaaattccaaacacataaacgtgtgtatttgtgtatatgtatatcacatatatttaaaagtagagagaataataagcgacctttacccatcatccaaattcaatagtgatcaaagttgagtcacaactgcttcatctatccctttttattgttgtttgctgaagtattctaaaacacatccccgatttgtgatttttattcctatgtactcagtatgcatctctaaaaatatggaaactttgttccatgttcacagtgcagtggcacattttataaagaatttcttgatgttatctattatctagtacgtatataaatttcctctgttacttgacagtgtctgttttacatttcattgttcaaatcaagatctaagcaaggttcacacactacatttggttgttatgtctctgaatcttttttaatctagtggttgggagttttgatagctggttttggtggctgaggacaggagtgtcaaagaagcaagggtgaggtgatggattttaagatatgctaaaaggaaatctttagaatcacagagcctgctagtagtagggagatgtaattgtaacttttatgactgaaataatatttttaggcccatgtcaaactttaaaaaatgcctcctttaaagtagtcttatttatatattttgttctatgtgaaacatatagctgaatctgagttgctatttagaatgtttagtcagtaactgaagttatctgttttacaccaaactagaataaagaaaaaaaaatcccaatgttcctaagagatctaattctcactgtaaattggaaatcagttatctttctgcaacttttcttcctcaacttaaaaaagagtgtttttcctttggactttatctgtaaattttcatatattaatttcagttaaaaccaggtactaccttgctaagataattgtgtctacctaccactgaatttggtattccttgggcaatgttatacagtctagtagggcatacatttaaaaattttataaaaattaaatgtacttgagcactctaagatagcgcttaatgtaataatgcagaagctcactgatgtaatgttcaaatcgcctcaaaatgtttatgcctcttcccagataaattgctttaattctccagaggatctggttgaaaattttgtggtaggcctcattttgagagagatgaaaatgattactaaaatacagtttaaaatgtgttttctttgaatatgtgtaatccctataaacatagaacataaattatagtaaactataaacttatattctctttgttggaaatcttgagttgtatagtatgaaatatctgtgagaccatgatcaaccttttcctgaatattttgagtgtggatgcaaacccatgtatcaaaatttattttgcagacaagacacatgctttaaacactgcagttgttagaaatgaaatctttagatcttaagacccataataaagaggaaagtaggtgaaaagtatgagacatgttttagtttcacccccactcaatataaggatatttattatttactaacagtgtaaatgtgcatcaatagtttgtacttttaactttgatacctaattccgaatatttgattatatatgccttttaggtgcccaaatgtgagtctgcaaaagctgccagaacagtggctatggagtgttttagaggaaattaaatgcagtgatccttcatctaaactctgtgctacaaggcgcagtgctggaattcctttctacatacaggtatttatctgtaggaccctagctgtttgtttatatttgtcttttgatgatagtgtatcctaacctgtttgacgtgtgagtgagcgtattacacataaaggacatttctgtcttttcagcaccatagcatttgtggctttgttttaatgtggggatggtgtgttcctgtgacaagatctgttcttggaacaaaccctctaaaaggtcaatcttgtaatataaacagagggtggtataaatttctgtctgtgtattaagtaggcagacatcactgtggcacagtcattgctcacttccaggaagtgcacatgttaccccaccaccccactgtatttttttttaaaaatagtcttcctttcatctcaagaccttcaatactctctgtaggcaaccagtgttaacattttcttttcaattctcctataaaacgtccatccataaaataatcatgatcataatagtagctgacatttattagtggttatttcacctcattaactccttccctgtaccctattatcatccatatattctagatgaagagactggggtttaggtacgttaagtgacttaccaaaggccacagagacagtaagaactgagttaagacttgagcccaggcagcctgactcccgaacctctctgcatatgagaatatgtgtgtgcgagtccgttttccttttgaacacatatgaaaacatacacactgcttgctctttgatttcacttagtattataccttaaagattgcttcatatcagcacatttagatatggctattgatgggaaaatattttatttagaaattaagactgttaccttcatgaacccaaagaataaaaaccagtgtcttcacaatactaaatcagaccccatcctgaaagacctttggttaatatatagtaagattaaatccgggaatatggtggtataataaaagcactgaaaataaatggaatgaagtctctgatttttttcatgcccctacattttttccttatctttcttactcctccctcaaattcctaaaatccctttatgattttttggtgacagtgggcatcagttgcagaggttgttgacagagatcattgaagtagttctgctgaatggattttggtgaccttcagaaatcaacttttatttgatctgacccattctgtatcagtgtgtttcattctcctgcctctaattcactctgaccttgtgtttttacgtgtcatttgtctgtctgagatcaaatgttaagacaggatcaaggtctcactgcatatttgtgcagtgtgcttctttcagctctggtgcccaacttatactaagtattggtcataatgagtaatcagtaggtgtactttcttaccctagccttggcaagaatgccataactttacctagctctttgggagaaaaaagccgtggttccctgaagtcattttagtaattgaatgtagcttttttttagttgaatgaagtctaaatttttttttaaaaatctgcttaaagagagtcttcatttctcttagcgtgacttactaataaagttatattcctgttttggtggaaatctgcttagtgttagctatggaaaagaactgtctacttagtttgtgagtttaccttttgtgtagacagattaaaaaatattttcaatatagacataaagtttttttgaatagtcatttaaaaaatatatgttatctgagcctaaataaactatgagaaatttcttctaaatcaaactattttttgtatgtctttattttcctcttctgtagttttcaaatgcttcagaagaagctaactaacttgtaactttcactcttgagagccagtagctacaaacatgaaaagtagacatggagaaagggagtctgggaatgtgactaaagtgacattttttaacagctttattgagatgtaattcacatactatatagtcacccttttaaagtgtacaattcagtggttttcagtatattcacagaggtgtacaaccattatttagttttagaacatcaacccatgaaacctcccatactcattagcagtcacttcccatttctctctacccctgccactcagccctaggcaatcactaatctaccttccagatctatacatttgccctttctggacatttcatatatatggaatcatacagtatacgatcttttgtgtgtggcttctttcacttatcgtaatgttttcagagttcatccatgttgtaatatatattagtacctcattcctttttattgcctcaagtggcttaataccctatttttatgtttattggacatcggcaaagtgttagatacaaagtaagtaagaagctactgaaaatttcaaatataggacctctttggtgtttgcagtatttctttttgttccatggagtttcaaatgctttgatttgattagtcctccaagtaatgattcttttgtgaagaattaactaactgcttcatctccagggaggcttaacattcttacaagaattttaatccagagattttttgctttttaagtaaagagaattttcttgttagataaatttgttactgaaactgatttgtttattttatcagagctgccacctacttaggattcttaaggagttgtcaataagagccattttttggccttttagaattataaaatttaatgagcaaagtggaagtgaccttagagatgacatgatttcaccttcacctaaatttagcgatgaagaatctgtaggttcaactgtgaggttaaaccacttgcccacggccacatggcttaattaactttctttgataaccacatgtttttattaaggggattttgcattttgggattgatccagggaagcagcaaacaagtatatgtaaactaagaaccctgttaatttttgcattctttttccataggcactgttggcatctgaaccaaagaaaggcagaatggatttgttgaaaataacaatgaaagagttaatctctttggctgggcctacagatgacatacagagtacagtcccccaggtaatcatggaaatacacaaaccctccagtgttgttttttgttttgttttgtttttcacttttttcaagacggctgttaccgtcttgttacccaggctggagtacagtggcgcgatctcagctcactgcaaccttcgcctcccaggttcaagcaattcttctgcctcagccgcctgcagttgttttaaatctttgctttattttttaacaaaaagtttctgctggagataaagaactcttgaacattggacagacatttgaagcttgtttgaatagtttttctctccttcttttttttttgtctttaccatccacaaaataaaccgttgctttagttgaatatattaatcaaagcaaacaatttttaaactctggtgaaaacatccagcttatataagatattttataatactgttgcatctatgaatttgaaagtgcatatgctagcactttagaatttcatgtgtgcttctttgcgttgatgtacattttgtaactcagcagttgaaaatttcctttaaatatggtatctaccttttggggtgttcatattttactagcatttagttccttttagtcactacctacatatatgaagttaaagcactcctcatagctccacttcaccactagggagtaaatattaataactatcaagtactgcttgtacgttatagtctggacttcctcagttaatgcttcatagtaggacactcctttttggtttgtttgttttttgagacagagtctcactctgttgctcatgctggagtgcagtggtgcgatcgtggctcactgcaacctccgcctcctgggttcaagcgattcccatgcctcagcctcctcagtagctggaattacaggcatgggccgccatgcctggcaaatcagctgaggtcaggagtttgagaccaggcccaatcacctgttggccaggttggtctcgaactcctgacctcagggatctgcctgccttggccttccaaagtgctaggattacaggtgtgagccaccatgcccagcctatagtaggacactcctacccaactgtaaagggccatgctaggtcagggaacagattgagagctgaagtttacaatcaagtacgataagtacatatgattttatttcagaacctgtgggaggtgttaaagagagcccacaggccagaatgaggactgtggaaaagaaaggggattttatgtttattggatattggcaaagtgttagataaagggagcccatgggccagaatgtggactgtgggaaagaatccccattcttttccacagtcatatggaacatagtcatatggcacatagtggccagtacccatagatatgaaatgtctttatttctttaaaaaattgactgaaatgttgttaatcaccattcaaaaatgatcacttcaagacatttttcagtgaaatgtgaaaaaaatgtaattggttctattttcctagactatcacttttaaaaagtacatgttgagtatcttttatctgaaatgctggggaccagaagtgtttcagagttcagtttttttttttattattttggcatatttgcattatactgaacaggtcagcatctctaatctgaaaatctaaaatgctccaattagcatttccttagaatgtcatgtccgtgctttaaaaagtttcagattttggagcttttttgatttcagatttttggatttgggatgctctacctgtgctatttttataagaacatctaaaaataatggggcttggttttaacgagtgctggataattattgccctactctacttcaaggtgattaatggcattttagtgatcatttttatgaaattggtgagatttaaaaattttgtctctgaccagtcttctaagcttttttagttgataatttgctttccttctcccctcccagggttcatttctttattatttttattatgtatctttgaaatatttcagtatacagaaatgtatagtgaataatgaacatatttgaaaccagttccagtttaaaaaattaaacattacagagaccgttagttatgctgtggattcttccacatctcattcccgtttattcctcctcagttataatcactaacccaaattagtgactatcattcccaagcattttcatcatacttttatctccttttacatgaatgttgttttcgacactttttatactttgcttttgtcaatcaacattatattttaagattagtaagctcctgttcagcccctgttcactttcatttctgaacagtattttattctatttcatttcatcccttctgtgaatggacatttaggttgtttcccgttttcttctattacaaacaatgctgaaacaaacattcttgtgtgtctccttacacacgtgagtgtttctccaggttatatacctagaagtagaattgcagggttgtagggtacacacatattcaatctgatgctgttatgttgtctccaaagtggttgaactaatttatattcctgccagcagagtataagagtttccattgcttatcaacacctttgtattatcagacttttacagtttttgactttctgcttagtgtgaaatggtgttttctagttttattttgcatctttcttattactagttagctttaacatcttttcatatgtttattagccttttggtttatatatgaaagttgtctgttgaaagactttgcttactttaatattggttatttgtcccttcatttttgttttgtaggagttggatttttattgttgtttcaaaaatattttcttgatattgatttctttttgattatttgaattacatatatattctcccaaactatgttttctctttttactttgtggtctctattattatgtagatatttttaattttaataaaatagaataggtcagctttctcctttatggttgtacatttggatcttatttcagaaattataccccaagatgggaaagacattttatattttctttcttttttctttttctttctttcttttttttttttttttttgagacgaggtctcactctgtggcctaggctggagggcagtggcacgatctcagctcactgcaacctctgccttccaggttcaagcgattctcctgcctcagcctcctgagtaactggcattatagacttctgccaccatgccctgataatttttatatttttagtagagacgaggttttgccatgttgaccaggctagtctcgaactcctgacctcaggtgattctcccgccttggcctcccaaagtgctgggattaccggcgtgagccaccacacctgactgagaaagatattttatattttcttttaaaagttttcaagttttacttgtcataattttatgtaaatgaaaccatattattattttttactgataggatcttgctctgtcacccaggctggagtgcgtgcaagtctttatattacctgtaatttgtctttgtttagtgtaaaataaaataatttaatgtttgccatttggataactaatacagagacatttctgttataacacatccttttcttcttgatttatactgcgtctgttatgtgttttcatagataggtggttctgtttctgtgctgtctattaatctatctttggagcaaaaccacagttttatttttgtttcaacttttttgagatggagtctctctctgtcacccaggctggagtgcagtggtgtgatctcggctcactgcaaccttcaccacctgggttcaagctattctcccacctcagcctcctgagtagctgggattacaggcatgtgccaccactcccagctaatttttgtatttttagtagagatggggtttcaccacgttggccagactggtcttgaactcctgacctcaagtgatctgcccgctaaggcctcccaaagtgctgggattacaggcgtgagccaccacacctggcctaaaaccactagtttaattattatgtctttataaaaagttagaatatctggcaaggtgaatctctctttttttgttttcccttcagaatgaccttgggtatgtttgtcctattgctgttccataaaaattttagaattagcttgttaaactcaataaaaagcccttttggaattttggttagaatttaaatgtattgatttatttgggaaaaattatctttttaagtattgaatcttccatgagcatggcttatttctccatttattcagatcatttaatgtcatttattattttttaaactaattcccataaaagtctctcttttttttttttttttttttttttttttttttggagttggagtttcgcttttgttgcccaggttcgagtgcaatggtgcaatcttggctcactgcaacctccgcctcctgggttcaagcaatcctcctgcctcagcctcctgagtagccgggattacaggcgtgcaccaccacgcccagctaatttttttatttttagtagagacaggatttcaccatgttggccgggctggttttgaactcctgacctcaggtgatccacctacttcagcttcccaaagtgctgggatcacaggcttgagccaccatgcctggcccataaacgtcttatagattatttttgagatttatttctaatgtctttttttttgcaattatgaatggtacttttaaaagattatattatctgttgctgtttgagaagaatgcagttaatttttgggttataattgtgcttgtattcagcagcctatcagaattgctgtaacacagcaaatgacttacctgtaaattcttttggatttgttttatggataatcatacctttgacaaataatgctaagtttgttttaactttctattttttagttttttcaaaacagtttttattgtactttgctgctggaacctgtagtaaagtttggtatagaaagagagatagcaggcatccttatgttgtttctgatcaatctgctgcaatttttaatctacccagtatcttattaaggaaattgaattttattgaatattttttgcatctttttagataaatatgttttcttctagaaaatgcagatgtcatgaattgtattgatttttcaatttatctttgcattcttgcatatctcactggttttgtgagtgagactggcctgtggttttcctttttgtgctgtgcctgtcctgtctttttaaatatgcatcttttgatggaattatagtacatatacagacaagtgtacaaaccatatgtgtacctcagtacagtttcacaaagtgaacacatttgtgcagccatcaagaaatagaacatttctagcaactgaaagccccctcttgctctcttccagtccacatccttctctccaagagtaaccactagcctaacttccaatactctagttttagttttatcttttttttgagttttacataaatgagaccatacattattattatttttttattttagagacgggatcttgttctgtcactcaggcttgagtggagtggtacagtcttagctcattgtagcttcaaactctttgataatattttttatttgtgccttatttctcttctctcttcttggttagtcatgtcaggggtttatttctgtttcagagaatcagcttttgggtttgttaatgctcttagttgtgtttttgctattttaaaagtttctgctctaaatttttattttctttctgtgtttcaagtttattgttgacttattttctcttgacttaattcgtcacttaccacaatcattctagtcatttaaaaaaatagaagcatttgagatgtacatttttttttgaatttcacttaagctgcatcctacaagtattgatatgtaggtagcgtcttcaaaatatttaaaaaaaaaaatttgaccagtgtttaatgtgcttgaaaatgtgccgattttaagcatttttttaggccgggtgcgctggctcacacctataatgccatcactttgggaggccaaggcaggtggatcacctgagatcaggagttcaagaccagcctggccaacatgttgaaaccctgtctctactaattatacaaaacttagccggccgtggtggcacatatctgtaatcgcagctactcgggaggctgaggcaggagaatcgcttgaacctgggaggtggaggttgtagtgagccgagactgtgccattctgttccagcctgggcgacaagagtgaaactccatctaataaaataaaataaaataaaaaataaagttttttttaaagtttcttaattccatggtgatcagagcataatctataagttattaattacttggtatttgttgagactttatttgtggctaggtatgagggattttagaaaataaatgtttcatgtgtgctcgaaaagaatgtgttgtctctgtattttaggtgcaggcttctacatatgtccattggatcaaacttttttatagcattgtttgaatcttactaattttttgtaaaatggtttatcagctactggatgtgttttattaaatctgctatttcatttgcggattatccatttcttgtaattcagtaaattttttgttttgaagctgtactattggatatgtgtagatttagaattagccatggttttcaacccacaactaattttgaacttcttgttttaggttcatgctttaaatatccttagagcattgttcagagatacgcgcctgggagaaaatattattccttatgttgctgatggagctaaggctgcaattctgggttttacatcaccggtctgggcagtaagtgctgtcactatttattttcattgatttaattatgcttctgagtaggttttaataaactaatctttcactgggtgataaaaaatatttcctgccctttaccatgaattttcttagaaatctttggatcaagctacatttttgattcttgatatttcatggttccattttcactcatttgttggcttgttagccatctttcttttttttttaattttattgattgctttagggtttacagtatgtatgtttgactgatcacagactactctcaagtgatattacaccatgtcacttaaagtataagaacttaataatagtgcacttctgtttctctcctcccaatctatgtgctgttattgttacacattttacttttatgtgtgttgtaaacttacactacattgttgttatttttctttaaatagccagttatatttcttttcaatttaccactttaaccgtttttttaagtatatacaatgcagtggcattatgtgcattcacaacaacatttatcagcactgtgcatttctggaacattttcatcatcccgagcagaagctctgtactcattaaacactaactcccatctctcatctccctcacccctagtaacctctattctcctttctgtctctgtggatttgcctggtctaatacctcatataaatggaatcgtacaatatttgtccttatgttattggcttctttcatgtagtatatgaagggttgatccatactgtgtggggtggggggctgtgtgtgtatattggtttatcagtatacacacatcccacattttctttttttaatttttatttaagttccaggatacatgtgtagaatgtgcaggttttttacatagatataagcgtgccatggtggtttgctgcacctaccaacctgtcatctagttttttgtttgtttgtttgtttttaattgagttggagtcttgctctgtcacccaggctggagtgcagtggtgtgatctcagctcactgcaacctctgcttcctgggttcaagtgattcttttgcctcagcctcccgagtagctgggactacaagtggatgccaccacacccagctaatttttgtatttttggtagagagagggtttcactatgttagccaggctggtctcgaactcctgacctcgtgatctgcccaccttggcctcccaaagtgttgggattacaggcatgagccataacgctcagcctgtcatctaggttttaagcccggcatgcattagctatttgtcctgatgttctccctcccttcctgactccaacaggccctggtgtgtgttgttcccctttctgtgtctatgtgttctcactgttcagctcccaattatgagtgaggacatgcagtgtttggttttctgttcctgtgttagtttgctgaggatgatggcttctagcctcatccatgtccctgcaaaggacatgatctcattcctttttatggctgaatagtattccatggtgtatatgtactacattttctttatccagtctatcattgatgggcatttggtttgggtccatgtctttgctattgtaaatagtgctgcaataaacatatgtttcatatatctttatagtcgaatgatttatattcctttgggtatatatccagtaatggcattgttgggtcaaatggtatttctggttctagatccttgaggaatcaccacactgtcttccacagtggttgaactaatttacatttccaccaacagtgtaaaagttttcctatttctccacagccttaccagcatctgttgtttcttgactttttagtaatcaccattctgactggcgtgagatggtatctcattgtggttttgatttgtatttctctaatcatcagtgatgttgaactaccacattttctttatccaaattcatctgttgatggacgtttaggttgtttccactttttggctattatgaataatgctgcaatgaattataatgtataaattatctgagtcattttagttcttttgggtatatcatatggtaattccatgtttaactttttgaggaatgaacaaacttcttccccagcagcagcaccattttatactcccatcagccatgcacaagttccagtttgtttagatctttaccaatactcgttatctttttttttttgataatagccatcttaatgggtgtgaagtggcatctcattctgattttgatttgcatttccctaatgattaattatgttgatctggaaacaaaacaactctgagcgtataaatgtgtctgtattttggatgctgtggactctgctgttagtatgttaagttagtgctacaaataaactctatcaaaagtttgaaaaaacgagacactcgcaaaacattgaaatggaagaggttaaatactgagtcgcattttcttttgtaatatgttcactgtccagaagcattttgattcaaaactttaaagataatgggcaatacccagtacaattgttggatttaagaaagtaatttttcgtgtgttttcttatgatttctgggagaaacattatagtttgttttcctatatcatgtcttctagagtaaggagaataattatagatgcttgaaatgtggcttaaagtaaaaagtctggcaaagggagaagagaaaagaagctagatcttaatacattacctgcagagtggagtatttactagaaagtcaggctttccagttagtaagctgcacaaaccatttcttacctgtatgataagcctctaattgagagtaagtattttgcagtgaaagccaaaggcacagactcccattgtgaagaggaatcctttgaggttgccaactcttgcctagaaaattgtgcgtcttcctgtaagagatacacacttctggaattctgtctaagagcattgcataactactcttgaggacacagagtttaccttttatacttacaggaagtagagcaatgcctttatactgtcagtagagtcagagaggtaggaatgtggcttgaccatcaggaatactggagatcataaaagtgattgtcagaaatatcaatattgctttcttgaagccattagttccagatgaaccaagaaatattttccgtgaaaggactttctgagagtgaagcctggtgattcgtccaactttttagtaaaattcaaactatcagaaatgagtgattcattttttttttgaaaagactattttttgagaccctaaacagtaatacatgtgcactgcagaaattttgaaaataaagaaaagcataataagaacagtaaaagtcacctgttaaattaccgtacagatatgagcattctgattcattttctttctctttttttatgtgtgggctttacatgtgcatagtacatgtatgcatacatatccacaaaaggctgcataaatatatataaatgtttttattttctttctaatttcataatactaataattttatttcttgggatcttcctttttaacactttatgaaggaaacatttctatttagtttgctttactagaggaaataaatatcatagctataatgatcaacactgttacttaatattatcaatggttatattttcttctgtataaaaatctaagataaaatttatgagtcaacctatttaatggatgtgaagaagtattcacttacaaaaacaatttacaaaagcattctctgttgaagtgattttaagtgtgatttttccttaatgcatacgaaatacggtttgatttgcagaactttgatttgtacacatcctcttgggaatataactgtgcctaaagctggctacatctgtacttttgacttgattgtttttcctgataagttagggaaaacacacatgtaaaatgaacttaattttaacttgcagtaaagaaacatttttcagaaagcattcatgtatatatttaatttgtttttacagactccttagtctttcgtattgaaaccatacagatctctcaaactttgctacctagtaggcattcttaaaatatagggaaatgtagtatgtaaatattttcggcattagacatatctgcttactgtattgtagatgttatgttaagcactagaaatacaaggatagataacacataatcataataatggctgtcttattgagtatttctcatgtacctggcataatttacattgcattgattatcttagtagcttctgttatccaggtatgttctgttataatcctcattttacagatgaagaaaacaaggctcagagagatgaaataactctgcctaaggacacaaaactattacctgtccaactccagaatgtgtgctattgtagaggagatgtttgggtattttaagaatacaaagaaggtacattttacctaccttctagggttttggccctattttcttattaaacagagctggaagtaaagcccgggtcctaacattttattgaatggtactaaccaagaccagcaggaatgaaagaaaaagggaagtgaggcaaggaaagatgaatgatattaccaagggaaccttaaccttgcagaaaatctgagctggttgtcttgtacatggtgcatcttctagccagaccatgtgaaactaccaccttttggaacagcccaatatgtttgtcttttactggtcaaagttcatccttggggcattaccacaatttgggcaggtgttggcacaacccttgggcagctgctagggaagccagatcgcatgtccagtgatgtggcatctcatctgagtctgaaagtggctggatgaaccagagcttccatggatatagttggaacagacctgaggtttgaaataatgacttctactgtgttgaaaagctctgcatgaaagaaatttatagcaggggagtcatgggatgtgattgatgtaggtaaaagtggagacttgattgtaagatagcaagagggaaggaagaagaccagtcaggaagctattgtaatagttctaccaaaagatggtggtggctcagcaaagatggggaaaagtgatagtctttaacatattatttatattaaaaatatttcagagattaaaccaaccagtttagttaacaatctaagttaacagaaagtaatttgtggaacccgagaatttactaggcagtttttgtttaaaaatatcactcatctctctttattatgttcagtgactaggggaggcctgatcttctttccttgcatcctcatcctcattgcagaacaggcaattctcggctttcccagtggagcccgcccaaaaaactccactgagtatgccacttagagtctttctaagacccacactgggtttatttttattttggacggagtcttgctctgtcgccaggctggagtgcagtggcataatctcatctcactgcaacctctgcctcccgggttcaagcgattctcctgcctcagcctcactagtagctgggactacaggcgcatgctaccacgcccagctaattcttgtatttttagtagagacggggtttcaccatgttggctagaatggtctcaatctcttgacctcgtgatccacccgccttgtcctcccagattgctggaattacaggtgtgagccactgcgcctggcctatatttttatctggtgtatatttagcttgcttcccccagggtaatctggttcatagcatgcagtgggtttcaaaggagggtaggaaaaagatcctgttagatctgcccagtagtgctgccatgccatggctactctgtgcctctgttggcaccagcatctccaggccctctgataattatgaggttgccacaagggtgctacactgagagctgtgtactgctgaaacctagctgtgctctattcactgtgccgcgtgccttggcatggagcttcattgacctagaggaagagggaccttttttctaattcactcatatgtactatatgggctagtttaaaccctgtctcttcttttgtctgctcataggtgaagtgtcttgctactttggaagagggtcaccagaaactctaggacatggctggccctccctttaatcataggcccagaaatcccagcacagttttcctggattacagatgatagacttgtgacccaaagttttaactgtcttttcatggtcacatggctaagaagtgatggaaggcgaattagaacccaaatctcatttagttttctcagaaaatatttttttctgctaccacgtacacaagacaaaatattaagtgtcatgtgtggatcccatccttaagaaattgactgcctattaaggatagggtgtgtggtgtgtaaatgaccatattacatagcaattgcacatagtaggctgtccattcatacttttcaaatatttttcaagggagcatttctattatataagaaaagctatatacatagataagaaaaatatacacatatatacatgtgcacacacacacacagaaggctttgtgtaacccagttttaattaccaaactgttctgtattttttttttttttttgagacagagtctcactgtgttgcccaggcttgagtgcagtggcgccatcttggctcactgcaacctccacctcccaggttcaagtgattctcctgcctcagcctcctgagtagctgggattacaggcgcccgccaccaagtccagctaatttttgtatttttagtagagatggggtttcaccatgtcggccaggctggtctcgaactcctgacctcaagcaatccatctgcctcggcctcccaaagtgctgggattacaggtgtaagctactgcacccagcctcttctgtatcttaaacgagtctacatgaaagctttttcatgcaagaaaggaaagaaaaagttatacactctgtgaatagaagagaaaaattttggtaacagttgtcagtttgcagttgaattccaagttcctatcaaccatgtatttagggcttgatggagaaggaggtcaggagcaggaagtgcttccctcgtgagaaggatagattttagctgggattaaagtcatgcattacttaatgacaggaattaattctgagaaatctgttgtttgggaatttcattgttgtgtgaacatcatattgtatacatgcacaaacctagatgtatagcctactccacacctaggttgtatgatatagcttattattcctaggctacaaactgtacagcatgctatcatactgagtatgctaccatgctgagtatgtaggcatttgtaacacagtgttaattatttgtatgtctaaacatagaaaaagtacagtaaaaatacaatattataatcgtatgggactatcattacatatgtggtccattgttgaccacagcatcattttgtggttcattacagctattatcatttctccatttttagctgtactactgcttacccttttctgtctttactctcctttttacttattaatggcaataactgcggttacttttgcaccaacctaatgtgttttccatctatccttccaaaaagggacatgttttattgccaatactactaatgtattactcacattaagattgctatcaatgattcatattagcatttattgtcagtgaattaggagttgataatgtagtttgttagtcacaacctctttctcaattctttgtctacttcagtttcctccttgttagctttatttatagtggatgggaacagaaaatatggatgaaatagtaaaacatacaaagcaatacctgaaacagatatccttgaaccattcatactgtcacacagaaatctaggggacactcttctgtcttaagtaggaagtaggctttcatgccagttattttgctctatatttacaataactcttttaagtgttgttctgtataacttacagaattctaaaacagagtatgtatttttcaacctataaaaatcaattacagtactcccctcctcaaatttgaggaggatgcattccaagacccccagtggatgcctgaaaccatggttagtactaaaccctatggattctgttttttcctatacatacatacctgtgataaagtttaatttataaattagatatcataagagataacaattataacaatagaccataataaaagttaagtgaatgtgattgctctcaaaatacgttagtgtactataccacaggtaactgaaaccacagaaagcaaaactgctaatgagggaggaccattgtaatgtaatatactgtgtgaatagactaaagaacaaaacccacattattaagcagatacaaaagaggcatttgacaaaatctaatgctattttatgtgaaaaaaaactaagaatggaagggaaatttctcaacctcagtggaaaatccagagtcaacaatatacttgatggtaaaggactgaaatctttctctctaaaatcaggaacaagacaaggaaatccactcttgtcactcctattcaacattgtactggagttcctagtaggccaactagagaagaataaaaaataaaagttatccagtaaaggaagatgcaaaactatctctattttctgatgacatgatcttaaatatagaaaaatcctaaggaatccacacacatgcaaattaaagcttgtctattagcaaggtttcaggacaaaaggtcatcatacagaaattgtacactagcagtgaaaaatctaaatgaaattaagaaaacagtttcatttatgatagcatcaaaaagaataaaatacttaggaataaatttagcaaaggaactgcaagagttgttcactgaaaattatcaaacattttttgaagaaattataggcctaaataaatggaaagatctcctgtgttcatcactggaagacttaactattgttaagatgacgtattccccaaattaattaatctatagattcagcacaacctctgttaaatcccttctagcttttttttttttttttttttgcagatcttaaaatacatatggaaatgtgagggacccataatagccaaaacaatcttgaaaaagaacaaagttggaggccccacaggtcccaatttcaaaacttaatgcaaagcaacagtaaattagagcttgtggcattgacataaggttaggcacataaatcagcagattaggattgattgtacagaaataaacccccacatttaataaaggtgccaagacaattcagtagagaaagaatagccttcaacaaatggtacggggacaactggatatccacatgcaaaagaatgaatgtgatccccatctcataccatattcagatgactcaaaatgtcttaaaaacctaaatgtaaaagctaaaactataaaacttgtagaagaggacctgggtaaatttttgtaccttggattagataacatttagttagatatgacacctaaggtacaagcaatacaaaaattgataaattagactgggaatgaaaaaaactgataaattagactcgatcaaaattaaaaatgtctggctgggcatagtgacatgcacctgtagtcccagctactcggaaggctgcagctggaggattgtttgagcccaggaattcaaggctgcagtgagctatgattacaccactgcactccatcctgggcgacagagcaagaagctgtcttagaaaagttaaaaaaaattttttttaaataaagcttaaccagcatcaagaaaaaaaatgtttttcaaaggacacaatcaagaaagtataaagacaacccacagaatgggagaaaatatttgcgtattatacatctgataagagtggagtgtccagaatatataaagaactcttataactcaataataaacgacaacccaattttaaaatggacaaagaatatttatctccaaaaaagataggcagatggccagtaagcacacaaaaggatacttaacaccattagtcatgagggaaatgctacaatgagttaccattccatgcccactaaaataaaatgcatggaaaataactagtattagggaggatgtggagaaattggagaactggtgaaattggaacgctaatacattgccagtgagactatgaaatggtgctaccactttggcagttcttttgaaggttaaacatagagttactctgtgaccaagcaatactacttctaggtatatagtcatgagaaatgaaaacatgttcacacaaaaacttgtacatgaatattcttagcaaaattattcataatattccaaattggaaatagcccaaatgtccgtcaaatgaagaacagattttaaaaatacggtatatctgtacaatgggatattattaagccataaaaaaggaataacatactgatacatgctacaacatgggggaaccttgagaacattatgctaggtgaaagaagccaaacattaaaggccgcatactacatgatcccatgtatatgaagtatccagaaaaggcaagtttatagagacacaaagtagattgtgctttcctactgcaggagaatagggagtgacgactaacggctcccgagtttcattttgaggtaatgaaaatattgtggaatttggttagtggtgatagcttcacactttgttaatatagcaaaaaccactgaatagcatcctttaaaataataaattttatatgtgaattatacctcaatttaaaaaagtaatttaaaagtgattttaaaacaatcatgcagtcacctttggaggttggtatggcatgaactaattattctgaaaatgatcaatatatggaaataattctttactaactgatgaacagggtaaccaaatagcagatgaggaaaaactttaaaaaaataaagtttttctgaggatgtaaatgattaatgcagaaggcctatagaatattgtgattttgctgcacctaatggaaaatgtaatgatcatcattgatcgctaatgagggcactttataagggatatcttagtcccttcgggctgctataacaaaataccacaaatttatttcccacagtttggaggctggaaagtccaagatcaatatggtggcagattcagtgtctggtgaaggcctactttctggttcatagatagcaccttttagctgtgtcctcacatggtagaagtgaggcagctcactggggcctcttttataagggcactaatcgcattcgtgagagctctacccccatgacttaattatttcccaagggcctccaccacctaactccttggaggttagaatttcaacatgtgaatttttggggaacacaaatattcagaccatatcaggatggatcaggcagataggattagaactgtctggtccatcttaatattactaaaaagacatgtgtctcctgccgtcagtctattgaatcaaaggagttttgtttcagagggtatccattcactttgtaaaatagtcctctacagttttgtttaaggtgtgcatttctcaacatctccaggcactcctgttttaattttactgcatctggcagcctttgtcagaaagtatggcttagggcaagatggagtctgtgtttctgttttccttttctttttgtgtttttgtgtgatttctgagaggagagaaggtcccagatatctttaccaagtcatcttagacctaaaagtctttgggaactacctcactagatcaggtagaagataatccagacctgaatgagggcagagattatattgataaagtaacagcatggattgatttgttatttggggattaaattaggcagggcacatagtagggcctccttggatgtttgatggctgttgaatgaacgtaagtgaatctgttcagttttagggttttattgcatttttgatatggattgtgccagtatatctgtaaagttcacttctatggctaccatgcatgacttgagtcagttctgggcttctagaggagaggttacaaactggtggccagtaggacaaactagcctaccactgttttatttggctttcatggtgtttggttctttttttcctttaatttcctgccagcatttcaaaatagatttcacataaaaaccagggttcctggcttctcttgaaaaagcagatgatctggcaaaactggacttatatttcctcatggcagcaactcagctgacactgactgcattagaccaagtccactgctgcctgtgtcactcacttttcctgtgagcatttgagcttgtgactctaagggcattgctttcaggaagctgttttctaaatcttaacgttacttttagtgatctttctacttatattgctatttaacacaccatgtggttatgtcacttacttaattagagtataaggtctgtaataccagtaagtatgtgttttctgtttctggatcttatccatggtgctggtatagggccttacacactgtagcaaggtgagtacatatatatctctacaccgatttttacagagtaattgaggaagcctatagtgccaaaacagtcaagacccttttatgctcttccaaagcatcttgacacattggtttggaaaagatagggaaaagattattatcatcttggagaaataatttgtgtttattcatggtaattcctgcctcttatctttactaatgttatcagttaatttcagtattgaaattacttggtaagttacttgcattgtgaagctgataagcaacattttggatttaactattttcttagccatattaattacctggattctttgaagttaggatttttggattttctttttgtttttttaaagacaggttctcactcttttgcccaggctggagcacagtggcacaatcatagcttactgcagcctcaaactcctggccttatgcaatcctcctgcctgagccttctgactacctgggactataggcatgtgccatggctgtaaaaataacaacaacaacaaaaagtcaaaagcaaaacaaacaaaaaaatctctaaaaaaatacttttttttttttttgagatgggggtcttactgtattgcccaggctggtctcaaactcctggcctcaagcagtccttccactttagcctcccaagtagctgggattacaggtgtaagccactgggcctggttctttgaagttaggttttataagtattttctcgtaggtaaaatgatttcagaaaataaatggaaagagctgaggttttactgcaatcttcattgtcaggaagcatatagaaaaatgaatttttagaaaagtgttatttgatgctctaagtgcagagattagtgaaaactgttgatggtaatattaggaatataggaaaaggctgtgttgtgtgcatgtgattgggttgtagagctcaattgaagtcattgaatcgatgactgtcaagttttttttttaaattattttatgaacacaaatctgtctttttagcctcacactagccagttaggtaatgattttgaattatctagtttgaacattgtaaacgttggtttcatgccaagaatatttaagccttattgtgttttcgtttgtacattaggtgcgaaattcatccacacttctctttagtgccttgatcacaagaatttttggagttaaaagggcaaaggatgaacattccaaaacaaataggtaagctccatttaaggctaactttactttttttaaaaaatacaatattgtcctggccaaaaacaaattttgaaattgtgcctactgttatagattcatctagagcataaaactataaaaatactgtaatgaattaacctatgctgccaagttataaacccttgggcaaaaatatcaactgtttaataagtggacctttcaaagcaacaaaaatttagcaaggtagcaaggggtgaaatgtagagcttgtttctccatgcaaaagctagtgttttttttgtttttttttttttaattgcatcttctttaagtagtcctgaaatgtcttaactttacttgtatatattatcctagcttgtataatatctttaattttataggtggaagtttaaatgtttatgatcctctcattagaacatctctcacattacctttgcattaaactctcgtactaagaggagcacctatatgtgttaaccacaagaaataaacagtgctttttacttttggtctttagttttatgtttaacctctaatttgtttttgtctttaaaaaacagcttttttgttatgcctgaaaagaaacctgtggaaccattttgattttgggtagtttttagataaaaatgcacaagatctgtttgtttttaaagaagaaaagctttgaatagttgttttttagcacttaagaggatttaatggtaatctaattgacttgcagttgttaacactagatgtcactgttgctgcacatttaattacttccttaactttatttaggatccagtttggcccagtggtctttctcttgaggatctagagttatattcaaagccctattcccttcttccctaaaaaagtcattatgcttcatatttaagttttaagctaatgtttattgaaatgcatttttgtgtgatggaactaaatcttaggaattaaaaaaatatgaaatcattttgtgatgtactagtgataattctaatgaaacctactatggtatttccgaattatcatttaaattgcttcttgtcaccctgtaacattcaccagatatttaaaaggaaggtaactggctgtaagtataaatcccttgagcatgttcaggcaataccagagagctttttaattttttttttaactgagtattttttaaataaataaaacattactcttgtggagggatgattataatttttattttttagcctgttcttaaagaaattcttcctgtcactaacttgaaatcactaatatttgtttctccttagctttgtctattttgttaataattctccagtgtgctacagtttaaaacagttgggtcatgttataaggccttgataaatactggtataaatgaaatatgatattaagtcatcaaacaagtaaaattaatgtttaaaactgaacttgaagaaaatttttttttgttttttatgaagtgattcttgaatatatatataaatatatatacattttactatgtataggagaaaatgatcagaaaatgagaaaacctcatttaggttgtatctgagggaggaagaatagggcagtgatactatacaattttaattttttgccaaagttacaatgatggaaacctccattataaatttattcctcttggataggaaagattacaaaatatataagatttctagaaaaaaggaaataggaatgagaagtttttaactgtgaagaatgtgagagcttttaattttagtaatctgaagatcggtatggaccattatgtgtacaaggcttctgttccctgtttaacccatgaagatatatttcttggcagctcccattaggtttgctttgcaaaacctttagtgtcttaaatttgcagttgcttgtgatggttcttttagttttagtttgtttaattatgtcactttttgtttaaatgtttatatgcctgttccttccaatattaactttctgaaggaaggacctttttcatctgttctgggtacgtaatgggcactttaagaaggctagtaataatgatatcttggttggttacttatccaccggataactaacctcagccggtgacacacctcacaagtcagttgtttcctttcacaaccacagattgtcctgctcgcaatttggaaatgtgtgttcttggtcagagggaactggacataaaaagaacatctgctttttccatctaatgggaaataaaggtctgacttggagtaaacaaacctggtttctaggcattttgctgccactggagatgaccttaataggcccccttatccactttgcacttcagtttctccatctatataccaggaataataagatctgtgctgtctactcctagggctattgtgaggataaaacaaactattagaagttcattttctttaacatattggaagtcctaggcaattagagatatagtttggtttttctttctgttaccacttctgtgattgtactcatctgattgtcttgctcttaagaccgtgctttttgaggacaaggtcagtatcttaaccattcttgggtacctagagtctagcatagtatctggcatatagaaggcatataggaataattgcctaatgaataagtaaattttgttactagaggagaaataagaaatctggtttctactcctgcgtttgttacaatataaccactataatcaactgagacaaaatagccaacctctctgggctttggttttcttctctgtaaaataaggtttggaatattcctgaggtcttttctttttttaaaatactaaagtaaggctttacataatgttactggaattgtaagtttggtaaaatgatgtattcccagtgccgtagaacagtccctgtcgcatagtacagacaagaagttcctgtttcatatataaagaaaggagcagaggatcctttgtaagtgtgtagagggtacctgtaatgactgaatttttgcacccattagtcttattttagatgtgttttttgggttttaaagaatgagaaaacagaagtttcacttgtgcttttaaagtaatattattacattttaacttttaaagctcttttcctttctgtttattgctgcgtgactgacttggcctgacagaatgaagaactgattttatgtaaaatcagaaccagcaaagctctgcaacctgtgcaatatgcatgttttctaaaatagcctccatctccatgtgagtgagctcagcttcatagctcctcatttcttacaggacaggagctaaactaatatggcgcttagctctaggtctttccttttagcccctgtgtgtattaactttcagctgtgagtcccagctaaatgatacatgtcaatatgtagcaatcagaaaaggtttatttttgacttcttggagtgtgctttgccaaagcttcatgcaggttcttaatgtatagcattgtctagcttttgcacactctccaccttaaatcagtgagccaatgagaatttgaaagcacttatcatgaactcagtattaacataataggggagtacatgaagaatataaaacttggatcttactcaaggagtttacagttcagttaggaagacaaaaattgttacatgtgagtcagatacaaataggagacaccatataaaaatcacctgtacaatgtgatgtgagtgatgaacacattagaaatttataaatggtagaattgagtggagtatatgttggggggaagtagtattttttacaaggcattgggaaatgagtagatttggggtacatggaaacaggtagattgaaagaggaacaaaataatagttttgtttactgtgttaagtacaatctctattctgtcttattaaagagagctcatattcaaattaatagcttaggataatttagtacaatttaagaagaaaatgtgtttctaaaatcatgggatgatccaagtaaaattgtttctagtgactatgttgggagatgttaaattgtatttattttattttccagggtataagtgatagagaattattttagttatttttcttagcattttagtggtgtaggtctggaaggatccttcaaggggcatctaatccagtccagcatcgtgcttatagagagattttgaagcaatttccagacagactggcttctctcctgttcttcatgttttctaggaaaagagattccacaagtttctgtggttacccacgctattgtttgggaaagaattgaattctcaaaactaaaattgaaagctgcagggcaattgggttttcatattttagagaatgtaattattagaattcagaatagcttatttgcttcgaactacatagtaacttgtagcaagccctatttggccaaattgaaaaacagaattttcttttgactgtggccggggtaatttttttttcttttttttttttttcccccccaagacagagtctcgcactgttgcctgggctggagttgaatggcaggatctcaactcactgcaacctctgcctcccgggttcacgcaattctcctgcctcagcctcccgagtagctgggattacaggtgcacactaccacacctggctaattttttgaaattttttttttttagtagaaatggggtttcactacattggccagattagtcttgaactcctgaccttgtgatcgcctgcctcagcctcccaaagtgctgggattataggcgtgagcggccagggtaatattaacatcctcaaacccaaacagttctaattttctccactgaacaagcatttattatgtttttactctgggccaggccctctgctagttactgggatccaaagataaatcagaaatactctctgccctaggggactccaagtctgatgaagaatatggcagttatctgtggtgctggagtctctgttcagttgtgtagaaggacaggagaagttgtgaaggaaggtaacatttctttagtgcgtgggccatgccagaccctttatacatgtctaacttagccgagatcacagctctgcgaggtaggcagtatcatcctcatttcacagaagagggacctaaggctcatgaggtttagctacttgcctgtggccatacagccagaaagtggcagaactagaacacaaagcgagctccatctgcagagcacatgctgttacacaccaaacaacggattccctcatgggcagggtgtcacctttttggagttggctttagattttattttgtcagactctttgggaaattagccacttcacccaaagtctgaatgttgaccaataatctcaaatctcccacatagtaggttgattttagcaggaaaggtaggagtaaaccagaggagaattttgttttgggttgactttaagattctttatctggacggtaaaagacaataaggatgtgtattttttggtgcatgaatgttatttacctcaatgagcccctcgctgttctcatgtagacagaggtgagggaggagaggagcaaggctcaaggtttctaatgtcaaccgggaatgtcgtaaaactatgaaggtagaaatcttagttttctggttagaaagtagagaatgaatgaaattaccccaataaggatatcagtgttgctagcaagaagttaactttttttttttttaacatttatctctataaaactcttatgtttgataatagtttggtgctattgatagaggattttgaggcttatgataattcttatgatttctctagacttaactctttctctagagtgtgtgcttatgtctttcattgatatctttaattaaaatgatactaataaccattattattatttgtttttatctttgagaggacctaggaagtcatccagtctcattctcattttgcagatctgaaaattgaggtgcagaaaagttaagcaatttgtgtaaggtcacagagctagtgctggtgatagaatttaatggttatttttagttcacaataagctcaactaaaacattttaaaaaatcagtcgattatttagaaatgaagtttctgttagcaacagtaatagtagtttggattcagatgattctgatttaaagtatgaagttaattttctcaaagaggtgctttaattatcataagattataaatattaatgatttgaaagtaagttaagagctctagtgttttggtatagtctggagtgtcattcatgcattttccagagttgtttgtagaattaacattcaatcatttatctactctttaggcagagtagataaatgagtatttttggagactgagaggtaaagtacaagttttgtgtaaccctggttgagatgttcctaaagtcagaattaagtctgtactgacactttggcctattagagagtttcatgtttcaagtttttgttcattcttaggttcatagattacaggtaggagaaccacaaataaagtttttaactgaaaagaagttcttcaaaagaaatgttttcatgaacttgaagtgggaattagtcattgtgttcttaaatattgactcttacgtggacgaagtaatctttatttctaagtactgcttcaggccattgccttctttaataactaaggcattgttgctttagtttgagcatgttctatggaattttggcaatgcatgtatcctctttctgcatcttagtaaaagcatgagtaaatattttttcttagctttggtatttttgtagcttacattttatatgggccagactaatataatgtaataccaggattacataatttaagacgtcaggattgcttccaggagtatgagataaagtcttcatttatcagggggtttacaagcagtatttcttgccccttcaatacctgtagagcaataccactgagctattttccaaatgagaaaatggagtctaagaggttaaagccagagggaacagtttctttagaacttggataatatttctttattcagaacttggtccttgtaactactgatttgagtaatgtacagtttggaaatctcaggaatttccagctattgttgttatacattgaacttttaaataaaatatactcttaattttttcattgaatactccttatggaccttggcatcctggtatatacaaaagtagtttataacatgtctgagatttcaaggagtttaccatttattgagaggtaagaccaacatggaaactagtttaggaaatgtgagaatcaaactctctggcactgactgtcaggggataagaggtcagaggaggatgaggccattctccatgtagcagtctgggttgaatccggacttgaaaggatggtcaggatttcaataggtagagaagagggtgttgcatatgggatcatgtaacataaacagagatgtagaagttggaacacacattgtacatgtctaagaaaattaaaagatgaatcagatgaggaaagagaggacatgtggaagtgttcattcagtcattcattcctagagcaaggattcatggtcacttagtctgcataggcactgtagtaggttctgagactatcagtgagtgtggaaaacagacatgtcaggagactagtttgaattttacagaacattgggattcatttagaagtctttgtatcagagtattctgtgataaaaccattgctttaggaattatttgagaagtgattgcattctgtaccactggctggtgggcatggagaatgtgatgcaaggccttgaaagggagtgccacttctaaattgagtagcagctatgttaatggggaatatatgtcctatgttttaacgaatactagttttctcaagaaattaagagatgtttagtgaaaaatagatttttctgttattcactgactagaaatgctgaattaaataatgacaggtttctcagacctgtgctataatgtgttttgagaatcatcaagagtgggatatagcatgcagtatgagcatttccctaaattatttgaccatggagattctctctcttcccttctctctctctctctctctctcaaagaacatatattgccattttttttccatccaacagtttggggaatactgctgtcgggatactgattaaagcaggtgaaaggcatatttctgattattaggagcagtagatatatctactgtgagaaagacatatatatttgagatatatcttggcagcaacagaaaggattagttttagttacagctaaatacactgtaaattatcccacattgtcagataaaaatgtaaaatagcgtcctacatatagtaggtagtcaatacatttgaatctaggaaaatttcataattgtagacctttaaaaattctataataaccaaaatgcctctttgagagaatgaactttatattctaggttagaatcttctaacattttgtcagaagaacataatttccattttcccaatgatttgaccattagtatggggaagatagtgcctataatacagttggtgaactgatcagcaagattagtacctaacttgcatgactgtgatatatgtatctgtttgtggggtgggtgaagagtgccgacagggagaacgacataacatagtaaccagctttgaaatacagtcttgctagtaaattaagtagcacactctgttgttgtcattcctaatccccacagtaatagcaccgtctgttaacatttacccagaggcttgaaataattcagacttatgcagctagaatccttttggctgcgaataacagtaaacccaaatcaaaatttaaatacagacaacttactatcccatatataaccaggaaattttaaagaggattgattcttttgaggttgaaaacatcatcagagactccgatttcccttcttgtttctgctgtgccatccttgatgtgatgccatgagccccaggcaagcttccttcatggttgcaagatggcttcagttccagccatcatatccagacactgcagtgtctaggcacaatacccagtggccttgtgcatttctgtttctttttaagagcaacagcatttcctcctgtttatgttcccatgttcccacctccacactctacacacttttcttcatatcttgttggccagagttaacatcttagcatggcccagcttatccctggtgatagaaatagatccactataattagactaataggattcatcagttgggtctggggttggtgctggtcctccccgaagcacgtgactactcagaagggtgaatacccaaccaaaatcagttctgttaagaggaaggatgagatagaggaataaatattgattaggcaactaatcatgtgtgctactacattcttctaggctatctgaaaagctctgaaaatgtttgtgttaagaacagtgacttaagactatgtatgtagtattttagcttaataggaaaatatgtttttcttttatgtattttctttatgtaattattaaaagatgtgaagtagtacaagtgtctagatatatgattccataaaattcattcctgtaagcagcttgcattataaaaatctcacccaggaacaaagtgtgtgtctttacacatgactttactaagttttgtagaacgttaaaatagagattctgagtagaatgtaatcagttcctaaccacgaaaatgctattctgcaatatgaaatgtctccctggttcagagctaatctctaacaagctaacagaatgttaacattgttttttaatataaactctaattcactttcgaatttcacctctatattatcacattgattttcttcttgtaaggccaaataatgtgaagtcaaatagtctttctagggtttttttttttttttttttttttaagacagggcctagctctgtcgcccaggctggagtgcagtggctggcacaaccttggctcactgcaacctctgcctgctgggctcaagccatcctcccgccgcctcaacctcccaagtagctggggctacacgtgcgtgacaccatgcctggctaatttttgtattctttgtagagaccgggtttcgccatttgcccaggctggtctcaaattcctgagctcaagtgatccacccacctcagcctcccaaagtgataggattacaggtgtgagccaccatgcccagccgtctttctaaatttgttgggattattaattatttttatttatgaaccaagtgttttgatgtaacttcttggtctctgaactcaacttaggtcagttgtcctgaacaatctctctttctctgtttgctacgtttctttcttttctgtcctctaaactctaaatgtttttttcagcatatactgcctctatagaagtggtccatgaggcggtctgggtcagggcagaccgctcaggcttagtagaagacggggtcagactaacttctcttgagaaagaaacaggttactaaatcttggagggctagaattttccactctataaacacaattctagaagcatctaatactcttcagacatcttcatctttcttttatttatctctatgatcactcaaattctgaatacctgaagttgatttagatacatataaatggtcaattgcatacttccctccttcaattcacttgatttcttcttttgccccctataagcaaagccttcttatgccgctggttccattttctatgattagtgtcctgtttagatgattcaacattttttttcttcatcattcattcagcacagacgtttgcaaggttcaaggatctgagtactaaggggagtacagacatttataaaatatggtcgaaatctttggggaagagtggaggaggagagataacacttgaactcggctgtaaacgtaactctaaaacaaagtggaaagctgtcagtactctgtgaactcctttcctctctctcaggggaagagcctgcatgttccactcctcccatttcctcacttcagcttcactgtgtaattgtacctggaacagagctctttctcacagtcttaaaacacacatcctctttaaacccccatctctttaattcttcttccattaaggtgagaaaatgtcatctatttctgtatctttcttccttcttttgctctatccatatgacactaagtgattcaggtcatggtttacaaacacagagcagtattgatgatatgcctctcctacctgtacagtcatgccccacataacatttcagtcaatgacagaccacatatatgacgatggttccataagattatagtggagctgaaaaattcctatcccctatgatgtctcagcacaatgtgttagtcgcatgtttgtggtgatgctggtgtaaaacctacctctgctgtgctgtcagttgtataaaagtcaagcatgggccgggcgcggtggctcacacccgtaatccctgtaatctgggaggccgaggcagatggatcacctgaggtcaggagtctgagaccagcctggccaacatggtgaaacctcgtctctactaaaaatacaaaaattagctgggtgtggtggcaggcgcctgtaatcccagctactcgggaggctgaggcaggagaatcgcttgagcccaggaggcagaggttgtggtgagccaagatcgcgccactgcactccagcctgggtgagagtgagactctgtctcaaaaaaaaaagcctaacatgtacgattatgtaccataatgtgatacttgacacaaaacgatgatgttactggtttatgtatttactataatatatcttttattgttattttagagtgtactcctacttattaaaaaaaaagttaactgtaaaactggctcgggcgggtccttcgggggtatccagaagagggtgtcgttctcataggagacaacagctccatgcttgttattgctcctgatgacctttcagtgcgacagaatgtagaggtgggatattgatgatcttgaccttgtgtaggcctaggctaatgttcatgttttctttttaacaaacaagtttaaaaagtaggataataaattttaaaaataggaaaagcttatagaataagtgtataaagaaaggaaatgtttttgtacagctgaataatgtgttttaacctttgttacaaaagatcaaaaagttaaaaattttaagtttataaagtaaaagttacagtaagctaagattaatttactatagaaggaaaaaattttttaaatcaatttagtgtagccttaggatacagtgtttataaagtctccagtagtgtacagcagtgttctaggccttcatgttcacccaccactcactctgactcaccccagaacaacttccagtcctgcaggctccattcgtggtaactgccctagacaggtgtgccatttttttttatctcttatagcatattttattctttttctatgcttagtatgtttagatacacatatacttactgtgttagtattgcctacagtatttagtacaataacatgttgtacaggtttgtagcataggagtaataggctataccatatagcctagctatgtaatgggttataccatgtagggttgtataagtatactctacgatgtttacactacaatgcaattgtctaatgacacacttctgagaacatatccctgttgttaagtgacaggtggctgtatttggaaatgaagttatatgtactaaaaacacattgtcactggcctttaagagtgacaagtgcccggttttccccagaaacctagcaccaggtcatcatctccatctctttcatgctttaattaagccaactttccgtttagcttcaaacacttcaaggaaataaaagaggttctttcaatgattctcttgttttgattagttatcaatattatagtagcataggtttcaatttttaattgttgcaaaagtgtagtgtttcaatggtgaagtaatttctgtgggctgtctgcagtgccaccatttatagcatttatgtctttggaaaaacgtatttcaattgccatatgactataagttgtgggctttccatctctggagatatcatacttaaatacttgcctgtttttaacctttctgttttcagccttggctaccttcaaaattgtgctgtcatgcactgccaaactggttggctgtcccatgaagatcaaattccatgacatccatggcattttttatggaggtttctttctctggaaacttttcttcccccaatccctgttaaatcgaagtttaacggtttttcagggccttgtgtataatatcactctttgtagaatttctttaatcaaaatagcaaaaggaaacatgtttcttggttcatttatcttagtcttgagtgggtttgtgtgcatgatctaatatcttcattatgtattaaggatcaactgtatgccagacttagtgcaggcattagcaacttattcttagggagcatacagtgtgctggaaatgaaacaaaacaaaaaccaacaggcacaaaatcattacagaacaggtaagtcttattgtgaagtgacaatagtgataaaaacgaagaagagggaacaatcattaattaggaaccaaatgttatagtattattctagtataactcaagtaagtgtttgattgttgttacatgttctgtctatgatgtatatgttttagcctatatattaggaaatgcttggagttgtgtttgctgtttacaagaggtttccctacttctcagagaaacttaccaattttagatatgtactctttatattactttattttgctttttgggacagagtcttgttttgtcacctaggctggagtgcagtagcacaatcataggtcactgcagtcttgacttcccaggctcaagtgatcctcccacctcagccccgccgccgagtaactgggactacagatgtgcaccaccctgcctagcgaatttttataattttttgtagagagagagtctcactacattgcccaggctggtctcaaagtcctgggctcaagtgatcctcctgcctcggtctcccaaagtgctgggattatagatgtgagccaccatgcccagccaggtgtgtattctttataatcagagatactctatgatataattgtcaatatttttattttggggggtgacagtaaatgagtatttagcaatattctctgttcccctgaaatttgtaatttttggtatatttacttaggagaaccacggacctttagagacctgagtccaagtgtgaattgaagaaaaacacctgtatgttttcagtaggcctatagactccaactcttttcctacatttattttttcttactacggtcagtcttttgtccctcaggtcctccccattatcactacccatcccatagatgagctctgtttccttatattcaaaacaaatattcttcaactgagattatctcttccttgctaccagttcactgctgattttacaggttagctaagtctagtgaaactgcggagtcttccaaagccaggtggatgaatggattatgctgtggtctaggctaggtcttgttgcctctatctgtttcacttttgttccctctttttatgttgaaagtagtatatgcttatttaaaataatggagaatatgaaaaagttagagtcttattcttgtcactcaaatacaatttttgttagcattttgttgcattttcctgtcattttctcattcgtgagtgttcagtttttataaggtatattactaattattatatacacacagttttgtatcctccctttttcgcttataggaggcatttttcatgtagttatgtaatcattcatcttctaagaggtgcttaagtaacattccttataatggacaaatcgtagtttacttgataattctactactattaaacatttcgtttcccccctagtttttaatattattagtaatggtatggtgagcatctttacgtataaaatgttttaatgtgtagggttatttcctacagatagattctcctaggtgtaatttatgtgtcaaaggttataactggcctcagactctatttacatattgtcagatttcttttcttttccttctttcttttttttttttttttttgagacaaggtctcaccgtgtcacccagagtgaagtgcagtggggcgatctcagcccactgctgcctcgacctcctgggttcaagcaattctcttgcctcagcccccaagtagttggggctacaggtgtgccaccccacctggctaatttttgtgttatttttagagatggggttttgtcatgttgcccatgctggcctcaaactcctgagctcaagtgatctgcctgcctcagccttccatagtgctaagattgcaggcatgagccacacccggcccttgtcggatttcttgaaaaacattttttcccatgtcaccttcctactcaggaatttttattagctttctgttgcctacagtctaaagtcatacccatctaattggtccttttcgtttttaaaacactttctaagaaactttttttgttttaaccacctacttatcattgagcattacattccatctgattttccacataataaaaagtgatgcagggaatattctcttatgcagagagaggcatgtttttttggattttttgaggggataaatgatcagcagcgaaaatgctgggttaaagaatataaacattcaatgaaactaataaccaagccttttaaaaaataagattatatcagtttacaaatttaccagttatgtatagtcttcctagtagtgagaataataattttttttaatgttcatttaagggaatgtgagggggaaatttccgtgtttttttcagtttgcattgtttttattactagtgagatttcaggtttgtccacattattttttggttaattgtattttcttcggcttagctttcaaggccctctgtaagttggacctgcccttttcaccttatctgctgttattcaaacccacaaatatttattaagcccctgctggctaacttctcccaccccaacaaataaacacactctaatcaagccaatctccctattgttcccttgaacttgtcgggcttttcctttttatgcttttgttcatgctttttctactcctacagtgcctgtccctcctcttttgcttacagtatgctgatttcccccatcctttgggttcaacccaaagcttttttcctcttggaaattttccctgacctgaccaacttgcttgaggacagggtccggggctcatactcccttgtatcccagtgccttatttaggatctgcctaatatagtaggtaggcaatgatgttgctttaaaaatgcatcttgagatagggagacctagacttaacttttggctctgactttgagcaatttattttagtcccccgggcctcagtttcttcatctcagggtcaatcataaaatggggatggtaatagtatctgcttctagagttgtgaggaataaatgtggtaatggtcatcccagcacttggtcttcctttccttaggacccttcctgatgtgccccagattctgtatgccatctctttcttgcggtggtattgtttcttgtgaattgttatatgccctcagataccaaattcttaagttggtgggggattgtattttaaattttttgcccatcctaaagcgctgtgtaaatgctgattgagtataattgagtagctttggtagcagtgagtataattgggtagctttggtagcagtgaaaatgagggcaatgcagtgaggaggacctcattttcagtcttttactaaaagctttactgaccctttattggagaactttctcttagggcctttaaaaaatatttaattttgttgcttattcagccaaatggagttagttatttagtagaaaatggtaaaaagatccaaataacaccaccggatttcacttttcccatatagtgtttcaaagcgttgtattcattaatatttgtgcaaaaacctatggttaataccacaagnnnnnnnnnnnnnnnnnnnnttaacaacagcgttactccctaatttacaccaagcattctcaaaaagctgaaacaatgaattcatgtttagtcaccgtgtgactggctattttcatttatttaaaatataaacaacaaaaaatatcctggataaagatctcccacatattttaactagtgacagatgctatgatcagtatttttacttaagtcaggcattttttacttacacctcaagccttgcaattaagctttagacctttccaagcataacagttaaccaataaaccaaaatatcagcctggtctggcttagctcagcggtcttttgatttcttccagtctgtttgatgtggaggcttattgagatttatctactgagctgttcatagtttgtagggctgagagcactggctatattatataagattccattagtgacagaagagtgtagacagtctctacagtgtagatcgtttagtcagttgtggtagtcataattttgttgaaatttttaagactgttgtcaagctttttaaaattaatagtcaattatttttcttatttaccagtttatactgtgagcctcaaaacagatgtagtttgattggttcaatttagtagaaattttctcaactttcaggagaagtctctgcagatgtgaaaacttttccaattatttggaccagtttacccacagggaaataaaaatagaaatacagagtaatcagtcctaaatatttgctgtgtgggtaggtaaacattattccattgtattgttcatgatggtagtagcatcagtataccaaccttaagtgctacaaagggcttttacatactatgtcctgtattcctggtagtgatactcagtaagtattattgtcccttttctaaatggcacacttggaatttgggttatttatttgctacatcatttcatatctagcgtgaagcagagctagtgttcaaatttgcactacatgaaaggttttttttcttgttaaataatatacagtatttcttaaagtaacaaagttttgccaagcagcatccccgtggtggttttttttttttttttttttttttgagacggagtctcgctctgtcgcccaggctggagtgcagtggcgcgatctcggctcactgcaagctccgcctcccgggttcacgccattctcctgcctcagcctcccgagtagctgggactacaggcgcccgctaccacgcctggctaattttttgtatttttagtagagacggggtttcaccgtgttagccaggatggtctcgatctcctgacctcgtgatccgcccgcctcggcctcccaaagtgctgggattacaggcgtgagccaccgtgcccggccccccgtggtgtttaatcacatcctctttctttagaagtagaataaaattactcacatttatcctgctgaagataagaaaataaggtcatattggaggaataatgaaacatatttatgctttctgcctcagttgcctcatgtcttgaatggggaaaatatctcttagggtttttgtgcaattgagtgagttcatacgtgcctgcagattaggagagtacttggcacagagtaaatgcacaatacaattagctcttgtaagcattcatttactcagtagggtatattgacctgctgctatgtgccaggtaatatgctgggcattaggaggtaaataagtcaaagtctttgcccacaaagatctcagaatcaagtagagtagacataccccaaactgtgtgctagcagcgtgaatattctcatatagaggtatgcaaggaggtatggacacacagagtagggatgagtagggactgttaggcaaaacttcctgtaagagtcagggcctgagcttgaaggatgagtagaagttaaccaagtgaagaaaactgtaggggcaaagggagccaggaggacagatgatggtagtgaaaggttggtgtgaacatgttttttcaattcagaatttcttgaagacattaatatgctgctatgcattatgattctccagtcgtagcattgactactcatttaaaatattgaatcatggaatccttttaatagaatatccattgaagagctgtgttttataggacacactttgggaaattctggatggaccaagtggtgagaagagaggagcatgagttcaggttggaaatgaggcagacaaggaggatggagagacagatactgattagagatattaagacagtagatttgataggacttgatgaaaaacaagggggccagggaagaggaaacatagtggcatggcagcagatttgtggcttggacagattctggggctcatggtgccatttacagcagcgaggatttaggaggaggaacagactggtgggggaagataccaagttcagttttgcccctgtgttttgagatgcctgggggacatccaatggcagatccaaaatgacatctatttggcagttagatatgtagggtctggagcataggagtgaggtctaggtcagatgaaggagtcatccgtaggtggtattttatgccaggaaagtgaatgagatcacccagaggggctagggtagactcagggaagcatcagtatttaagtgaggtatgaaggatgaggatccctcagcagacattgagtattttagtaatctgatattctttgggacaggcttgctcttttcaagatctgtgagtattttgttgtgttgtgtttttctggaaagtgtctgaatccacccatgcagaaaatctactttgtgggctcttcctcccaagaatctgggtagttgtagaaggaggcacttaacccacgctctgagctctctaaggagagctgtgtgagactctacccagcccttctgaactcagtcagagaaggtggagccatcttgcatcgttaagttttggagtgttaagtccttaaatgtaactggagaaataatgaaagggaagtattccactggattaaacaagttcaatggattttaattttcctgataaactattattaagaaattgttttggagatttactctttgagtaggattagctaacctccattttcatttggataaatagttctttaattagaaaccaagatttagagaatagttcctattgctttacatagtgtagagaaggtatgtgaaactgccaaatcaaggttttcctcatgatagtgagaagcagggaaaacaagaggaaattataatatgttaagggaaaagattcttttcatccaaatataccagcttttatcttcaattctgggtctttgccggcagggttttttccccctgttcttgtcatgccaacagttgcatatttctggcaaaatgttcgttactggctaggggtgctcaagaaatcttttgctagagaattaagcaagcagaagtctgtcaaaacaaatattctagtttgaaaatacagtcctgcgggggaagcaggaggagtggatagtggaggaggccagggcgtgttctgaggctgagtatttatttcataagaattctgtgttctgaaagactgttgtttgtaggaatgccggaggaagcgggattgtggtacattaaatgtactgatgagcaagatttttctggggaattttggtttgttcttgtgcttgttatgtagctcatgtgatgacagcctttgccgagagtgatacattttgctaacaaatagccttcttaacttaattcaagaggcatttaacaaaacttattagtttacatggaaaaaaacccaggcccaaggatactaaacacacataaacaaagatgcacataaataccagtccacttcataagcatttatttggctaggaatgccaacattatacaattccaatcttgaaagtattcattgattgattcaaaaaagtaaaacttgtttttccttctacttcttttttgttacttttttttttaagttacttgttttatagatgagtaagagtattaatggatagaagcaaaagttttagattcctttgttatatagttgctcaaagctactattatagaagttgctcttcaagttggagaaacataggctgacatttttggttttacccactgggatgggagtaggtgctaaccatattaagcctcacggatgaaaactgttgcatacaaaagtggatttatttcttctacagaattttctgaccatatatcaatatacaactgagattttgtgagataactataaataaaatatactaccttataatattgttgtaaatgatcttacatagtagaatgtattagtaataaagctctcaaaataactaataaaatagagatcagtttattcttagcttcttccggcaaattttaaacttgctactgtaagcaattcaaggagcacatgcctgtgtctggagcactgagaggaaaccatcctgctctttccttccctgatttcatatactttagttattggaagaaagattaattaatgtaaaatttctttacttttagtaattcaaaagaataaaaattttttgagggcttgaaaagatcgtggtgcaccattggcaccattggaatttgcctttagtaaatgtaacatttgttttctaaagaattataacaacatacttaaattccagaacagtaagcaaaatagcttaagttcactgacttgaaaaaacattcttttatactgcacgattctaaaataaatacttaaaagaaacagagagcaagccattctatcttggatttcattttccttcagatagaacagctagaacaaacattcttgctagttaacattgcctgtgtttttatgaagttaataactgacctgtcaatcacgccctatataaatacggtagttgaatgctttctgctttagaagcacttttatttacaagagctgccagccaagatttccaaaggactccacgggctgtttgctttgatctgttttgagggctggtctctttatacctgttggtttgctctttctgatacctttgtgtaatcaggtatggggagagcagatgtgcagaataaacacatcttaagggaaccaagtctcaagagaaatcaagtaattatgaatgaacagctctaaaaaagagagagagaatattttcttaaatcaacttagttgctgttatgaccaaagaacagatgttgtggtgttcaccccagagaagcaagagattttcccttaaacctcagcttataatgaatggaagtggtatgtgtatccctcaccctcaaactgttgctgtcctttaaatttgtaaattgctgagatgttgcagctcttctcagttgacttttgcctttgaccttttctcatttgcttcttccctaggaaatgttaaccacatgtctctgcccaaataattgagtctctgtgagagtgtttacctttatattttgaactggaaatgccttttagtatttaagacaattttccaaaaaagatggctttttgttttgtgattttgatttggagttctccctcaacactgagggagaacggaaagccaaattcatctttgtatccccgcaaatggcaaccatagggcacagtgtataagagaatgatagaaatgaagagaaaccaaaattctttggtcttccttccaaaatggcctattctgagtttagtttatttcacttttcaattaaatgttgccctaatcatttccatatattacatttaaatatcacttttctctaggaatctgaatgtttgaacatattagaggttgttaccttctattttagtttgaaattgaaacatcaaaccaaaaggtagcctcccctgtttttttaaactagaaatgtttaccttgactttacagtcctttaggagagcctgatttagagattttcaggcactagaagttcaccttactatttcaggaaattctctttatacttttcaaatggctttcatggacattttttggtcagcgccttccccttttgtgacactggcaggaatcttagagtttctgtggaaagatgcctgaacgttacccatggtttggaaagcaggtgttttattaaccagagttttctcctttgttgctctaacattttcaaaatctagtatcttaaaatgttatttggttccttatttatggttttaaaattctggcatctctatagtaatcaacaaagtataaaatgcagcccgaaatccccttgattcagcagccttcctcagatactcacttgccagagtaaaattatttggtaaatgttaaggtagattaaagcttgggtttaaactctgttccctctgggcaccttttgggggtcagaggtggtaaagctgtggtattgcctggagccagtgcaaactaacaccgttgtgttgcctgtgtgaaggcagaaacctctaagggatgtgaaactgccaaaattacatttgaacattttcaggcctttgattgcagaacctttgctgaaagcagtagtgcagggtagccagagatcaggccagagaagcaaggaggagtaaacttggatcggccatgccacagatactaggggagaaactgcctctccaaacgatgcacaagggacaactctgaaggtccatgggactgctgagttagcagattagctgagtcccctccagtattttcattttgcattcatccagggctcaaacctataattaaattttctgaacaaagactctattaacccagaccatccagattgatgactaacagctcttccttccaggtacataaggaaatctgtaatgcttaaagcaaaataaagaccctagtcaggtttgggggagggcaaagtcagggagtggatgtagttaggactgggtttacctttcaaaaatcattttttagtacttaaaatggacctttcaatggttcctgcacttactcaagtatatgtgatttactgaatgatctaaaacttagtcacagggattttaatttagatatctatgaaaatgtgttggtttttaaacttttggcacattgtttaaaaattctctctttaatattttgtgtgggcagtgtagacttaggtgaaacttttcagcacagacccagacacagttcattatgttactcctatgccaaaacttcaagtagctttccagtgtttgagaaataaggttcaaattcattagcttggcatttgaggccttccacagtccagcctactttctacgagaggtttttgctctagccttggctgttgtccccagcaaaccttatacacctctgcctcaacagtgtccttgtgccatccccttctccactgacttttctcctcctcctacagcctccccacactcctgggacaggtgaatcctaactgttctgcaatgccaagcttcacctagtaatactttaggacctctgcttttccaaatctgtcaacatcctggttaatcccacctcttgtgaaactggctttcctggagcattcctctgtgggctctcccccaccagtttggcctccagagcaatgttataccacgtctatggctcttaccacgccaacccttcatttgtggttggtttttgtgtttttgttttcccattcatttctgtcttgttttgtaaacttgataaagttccttgaggcttagaattgtatcttttatgtacgagtgtcctccagagcacttaacataatgtttaatatatatctgtcagttgtttgattgattggtgcatgtctcaggcccagggcttgatgtctttgcagtctctaaagacagcgagctattttcagaaccactgagtacctttgtaccaggtttattttttggcttttcaacttggtagtggagatgttaggcccagttctgtccagaaaatgtattttccaaatctttgcatggacagaatagtgttacagtcacagtctggagcagtttcacctgggtactgccaactctttcttatgctgactggctgacccatgtggaagtgttcctcagatctcatttcagctttctggcttaccttttttttttttttttttttttttttttattaagagaaagcttgtttctaagatccttttgggagcaaaggcaagtaagtattcattaaatgtttactttcttgactttaattcacttcaccaaatgataactcaggggggattatgccttgacagtgatctgacaaggtccttgttcagggtagttactgacttttccagtatcaaccttttaaatacagcatgaagccaacatccttgtgtctgaactatataaggaactggctttcttttaattttatgtgttttgagtttgaggaagatgcatattttgccaagatgtggcttttgagacttccgtgctgaactcatttggtctgaaaactactgataaaatttctacttttgcaaacttgtttttttgtttttgtttttaaaaagtaggcaaactcagttttttaaaaaacaagtctacagtagtgaatgccctaactgacacagcatgctttggcttctggaagcttgggccagactctgagagattttaatagccagtatggacctatgtacacagtagtcagtccctcacattcacacagcactgtttaacatgtgtgtatttattcattcaacaaatattttttgagaaccagccaggacccaggcattgtactaggttcatgagatacagggatgagtaatcactggatattttacttccttattattattttgacttttagtttctagtctgttttctcttactagaatatcagctctttggagggtgggtatttgcctcattcagtgttttatcttcaacacctagagcagtgcctgacatagcagaagctcagtaagtattaatcaaatgtatgaaagaaggtctacaacaagggatgtaaacacttataaaagcacatgggaaatgcatataatctgggattgggggagtcaaggaagacatcctagagcaagaaagataatgggtgagaggaaggatgtgcaatatttatttgggaaagaggagtggaggtgagggtgactgctcccgtgcaaaagtcaggatgaaaatgcacagggtacagagagggcagcctgaagtgagctggggaccttgtcagctaactcaaggacatgggagcaaagaaagtatcttaaacacaggtataacaggatttgctttagtatgatcattttggctgatgtggctggattggaaagttgtgctcaagactgagagatctgtttgtttgaataattttgtttgttagaataatgtagacaagacaagtggtacctagacttttctgttttgtgaaccagcaaaattttttttttattttgaagatcaacataatacagttatcaaccctttaattttgttaaataagtacattaaaaagcatattacatgtcagaatcatttcataaattaaaggacattttcacatacataaccacatatatacatccccctttaggaatctcaaattaatattagatatttaaatagaataccttagctttatgcagaatttacggcattgcactgtggggttttttgttgttgttttggttgttttcattttcttcatgaatgggcactggcatgtggtctgatatttgtaaaccggagatgtaggctaggatgaaaatgttggtgatcagaattaggatagtgacagtaggggttgaaaaaagtgaatagaattgagagataggcggtcgaatcagcagaacttggtgatttcaaagtacttgcagatctcttatctcatttgatcctaatggtaaccatgtgaggaagttaatttggttaggtatagttatccccatttaatagatgaggaaactgaggctcagaagttaggtgacttccccaagttacatatctgatgaatagcacaatgaaatcatcattcaggtggcattggactcttggtatatggcaccttcacccctttttgcttttgctcacatttcagggaagaaaggaaaaggaatcctgggctccctgtgagtcatatcttttaggtcaaaacatacgacgcagactgtccttagaataaaataatattttagtgatgactctttgatttatcttatcttgcaacatcatccattaccaatccatgaacttgagtaaccctatttaaattaggccagaggagatgaaggcttctttggcagtattttcatgttatcctgtgctaccctttttcctttccataaataagccttggccattctatttatggttgtgtttgttttgttttgttttgttttttgtcgagaggtagaggacagtgagactgtgtgtgtatgtaaggatatcccctatcacctgggattttttttttcctttctcatcctcagtgtatgtgcagattagtttggtgctatgtagattccagaaagaatggaatagactttataatggagtactccttgttgaagggcaaagacaggaagtggaagtgaataaaaagaatgaaattggacttaaaggagaaaaaagtgaagcaaaaacaatttgaattggacaaaagaaaaaagtgttagaaaatatttgtgggcggttccctataactgaattttaaataacatttttggtgtatagtcataaaatcctctgacctatgaaacaccagtttaatggaattaattaaaaataagatggaatgccagaatttacatatgaaaactatcagtaactgttccttcaattcattgtttttatttagtctttgtatcagtcatttttctaggctccttgtttcctggcaaatttgaaggtgtttttggaaaactgttaagattgactttaaattattttagtagagactcaactactagtaagtctgttgtaattacaaataattatgagaaatacggtttccttttccaagaagcaaataaacttgttattgaagcatctgcacctctttgtgtatatgttcacagaagtgtctacttttactactagaatgggcacatcaaaaccaaatattggtatcttattatgtgtgagtaggagagtgagagtagcattgtgtataccgccattttcatctcctttaatcacctcactcactgtgcatgtgtgtgtgtgtgtgtgtgtgtgtgtgtgtgtgtgtgtgtgtgtgtagatatcctaaatacgttttttctaccgatgtggaacattctatcccacttcatagctgtcttcctggcctttggcacgtgtgtgcacacacacacacgtatataaaatttagtgtttgattccttcaaagtataggtgttaatgtattcagaatgctgtgtaaaattttttatgccagacctaaattttattcatgctttcaatgcctgtactttgtgtatttttaaaagctatttgcattgtaagtttgaaagtgagttatgttctctggtgtactcttagtatcttagtatcttgagtgtgttgaacttaattgtaatttatactaatttcctctctattcctttcatctcatctttaaagtgctgagggaaaggaagaggacttggtggcaagagccaagacaaaagaacaatgtgtgtgtaatttgttcagaaggtacaaagttagatttgtgatttgttgatgcattatctcatttctcaagtaattccactaagtaggcactattattcccattttatagaaaacaaaatgtagtgacagagcgagactctgcttaaaaaaaaaaagaaaagaaaagaaaatgtaaaattatttagcaaggttgaatgaatcacccaaggttacactgccactgtgtggtattcctctggtcaggctggttctagacctttgctctttctctactttgcatttcctcattcccaccccaccacagaataaataatctgtggaacatggtttcacattctattccatgatgtagtagcagccttttctaaaatgaaatgctgtgcatattattattttttaattgccattggaagtaggctgaatgtagtcagataaatagtatttgaactgccttagtttatgtggaatattacctttgtctgaatgcatgactttttttaaacttttaatgtgattttataatttagatgagtatttgccttaacaatgatgagttttgcacatttttaagactacttggaggtatttatatacctcaaatatttactaggaagtatctttgcaaggttaggtaaaacattttaccaaatgagtttcaatgagtctctgttgggaaaggttaaatagcactgtagcgtagtcttttggcaatcgagcagttcgtctgcacaaataacagtgaatataattgatggtcttagtaataaggtcataaagtcaaaaagagctaccacagtgtggtcaacgttttgaccataaggaacagaatgtaaaagttggttagctggaaggatttcctgcctccttagtaactattgtgtctctgtttccttagtcatagctgaattgagaagaagagaaaaatcttttaattctgcatttagaattgatgtttttcagatttacatagtggaaagcgtgtttggatgagtataagccagaacctaacctatcctttgcataaatgcctttctgcaatactgcttattcaggataggcttctcttgtgtcttcttgttagcctgctctctaacccttgttttacacattatagcatttaatatgctcctgtttttaactgacagaattactctttgcattgttgtgtgtgtttgtgtgtgtgtgtgtgtgtgagagagagagagagagcgagagcacgtgcttatgcaagagagaaagtgtgtttgtatgacggacagaagtactacaggcataccaagaaacagctgccacctaaaatttataatcaacaatagaaagaaaaatagagattttttaaaaacgggaattccgtagaagcaggtatactgtaatatagggaacagatggaaaaaaagtaagttacactctcagggaggtgagatgaaattaagagcaatctgtgaataagaaggagctttagaaaattaaaaaatatgatagcccaagtaaaaatttcagtacatactagggaagacagtaaaaggacactgccagagattgacctagagagagggagatggaacatgggagagaaaaaataagattagaggattatcaggcagttgaacattcaacttacagaagttcagaaaggagagcagagcaaagtgagggcagaaaattatcaagtagcttaagaacatgtagaactaaagaacatgagtcctagtacagtgaatgaaaaatgattcaccccaagactcgtcatttccaaaattttgtgaagtgagagaaaaaaaaaacagctcatatacagagaattaggaatcaaaatgacagtggacttagaagttaatggagcattgccttcaaaattctgagggcatatgatttgcttcttattcgtatttaacttaactgttaatcacacttggagctaaaatagagtgtacttttattttaaaagttttcttttaaattaaggacaaggaaaatatctttctctttctttccaggacatacatgaatacagcacctaagtattttttaaaagttagttgccaaacaatattgtttaacataaccatgtatgtgtaatttagtgtgtgtgtgtgtgtgtgtgtgtgtttagacagggtctccttctgtcactgaagctggggtgcagtgttgtgatcttggctcactgcagcctcgacctcttgggctcaagagatgttcccacctcagccatccaagtagctgggactacaggctcacaccaacacacctggctgatttttgtatttttttgtagagatgggttttcaccatgttgcccaggctggtcttgaactcttggactcaagcaattctcccacctcagcctcccaaagtgttgggattacaggcatgagccactgaacctggctaatttaatgtttttatatgtgcatagaaaaggtctagaatggacaaagtggaatttctccttctacttacttatttgtatattgcttgtttgttttaatgagtgcatattaattgcaattaatagaatataactaaagggaagaaaagagacttgatttatttcttcatttatttaaaagaaaaaagttggcaggccaaggcaggaggattgtttgaggccagaagtttgagaccagtttgggcaatatagcgagaccctgtctctataataattagccaagcatggtagtgcatgcctgtagtcctagctacttggaaggttgagccagaaggatcacttgagcccggtgagccatgactgctttactgcactccagcctgggtgacagagcaagacactgtctcttaaaaacaaaatgtagaaagtgcatgctatgttgttctcctctgctgggtgctataagaaatatagttgaagtagcaaacacagcttcagtctttaaacgattttgggtctggctattaagcggaaacacatatgtaagggaatgactcccagctatgttgaaagtctgactctgtgtaatttcaatgtacaggctgctcttggggccaagcaaattcctttccagggtctgcaagaggtggcagtctactaacttcagagtactttaaaaaaccagcgtttgtgagaaaaccaaaaacaggactctcatcttggaatatctaacttaataaatttcatttgcatgtatacagaaaccaacctacttactgctgccagccccaggagccagaggttagagtttttaataataatagcaataatgagttatacttattccagattagttttctagctctcaaaaaaacaaatggctaagatgtccaaaatgttcttttcacaactctaccaaatgctggctttccctctccgtctggaaatccagccaatctgttgaaaattatcctattatttgagtacttccaggcagttcttcagaaggaagactaattcctgcagtctgagatggatgtccacttcttaagggactcttttccatacttctgcagctgaggaaaatcacaccttgtatcctgagtcttatttcttctaattgtgaatttgggaaaatatgtgtataccagacatcacatcatacctatagacagcattgtgtcttaattgggagtgtaacatttgcctggtgactacttgggttttttgtttgtttgtttatttttcttgtaaataagtctcagcctgagtgttcacagacttacaaaaagcatcggttcactggggaaaagtgaagcatttagcctgaataagaacaaatacacacactcttttctggtttgatttgcacgggagttagatgtttttttgggggtgggtggagggtagtaagggatattctagtatattaggaagagtctcttaatttgaatacaggagagacaggagacttattggacccaatggaattatctgtggtccagtgatctccaaaaatgctttgtaacagcagatgattagattttaaaagatcagtttagctggcagtttgcctgttcatctactcccataaattcagtgggtgggcctgactcagtgtgtcggagtagaagctcaggtgaggaaccttaatctaacctgaccaggctgattgacagcagtggagagactgccatacaaccaaaccatggggacacatgaacttctttggaaactggcctgtctgggtcacagtgtgtcctctgcttgttaagaagatgcctggcacagcagtagttagattacttgtaaaatagaaaccttggaatgtctaatgactagattgggaaataagataattggattctagttctgtatttacctccaagctgtattttgatgttgggagactcacttcatttccttgggtatcagttttctcatctgtaaaaggaaatgagtacagtcatttgaaaatacttctagttttattatgttccttgaaatatgggactattggcaccaccccctcacttgaacaatatgagttggcatattaatattaatcttagttaaaagtgttagctgaacaaaatgatagaaacaaaaaaaaattatttgagaatattggaccttatgctaaattagtctattcacttttaatgaatgaaagaggaattgttgggcaatttcttttttctttctttctttctgagatggagtctcgctctgtcaccaaggctggagtgcagtggtgctatctcagctcactgcaacctctacctcctgggttcaagtggttctcctgcctcagcctcccgagtagctgggactacaggtatgcgccatcacgcccggctaatttttgtatttttagtagagacagggtttcaccacgttggccaggcgggtcttgaacccctgacctcaggtgattgacctgcctcagcctcccgaagtgctgggattacaggcgtgagccactgagcccagcctgtgatttcttgatagtatagtagatgagacaaatgtagtactgtttgaactgttggcatgtttagtacacattcctgactaaggttatgtgatgctctttagaattaacaaagaagagtttctgtaatcttgtatatatctttagagtcaggttgattaacatggaacccctatggctgaaaaagaaggggcaggatttgtgggaagttctaaaaaaaatagcaagaagatagcaaatatttactaatgcctcctatgtactagacaccattctgggtgctgggatcagagcagaaattagatagtctttagtctcagggagctaacatcctagtgagaggagatggactttaaacatgtttcagtaaaacaacagtaactgttaatgttatgaaaaagtaaaattggtattgtagggaataatggacagtgggggatggaatgtgcttctgtaggttggaaagatagggataataggaaatgaggaaataaggagtgtggatagctgttcagagtttcactttagagtttctaaagccatcaagctctaaactttgcctctggagctcgtggtggcagttcaggatctgtgcttgcctaaggataagagagaggccaaactgttgatcacttgcctcaatcctgcttcaaccagaacagctctggtttctttgttttaatttaatagcatattttttattgtggtaaaatacacataacataaaatttaccatcttaaccatttttaagtatatggttcaatgatattaactatatttatattcttgtgtaaccattaccaccatttatgttcagaattccttttattttgcaaaactgaaactctatactccttaataactcttcattccccttttcctccagtgccccagtaaccaccattctactttctgtctctatgaatttgactgttctagctacctcatagaaaggaaatcatacagtgtttgtcttttgtgactggcttatttatagccacccctgctgtcttccgttactatttatatggaatatattttcccatgattttacttttaatctatttgtgtccctagagctaaagcaagtctcttgtaaacagcatatagttggatcatgtttttttttatccattctgccaatctcttgtcttgtggttggtgagtttaatcctttacatttaaagtagttactaatgagagacttacttgtgtaatttggctatttgttttctatatgccttatagcttttttttaatgtttagtttattttttgctgtgaaatgttttaatttcctcatcatttcctttgtgtgtttgtgtatattctataactattttctttgtggctgccatgggtttcaatttaatattctaaggttgtaacattctaatttgaatttataccaccttaacttcagtagtatacaaaaactctgctcctatatggcttcgtctctaccccctttcagttaccgatgtcacagatttatatctttatacagttgtgtccaaaacattagtagttgttttatttttgtgcataaatctcttaatttatgtagaaaacaaagtatgaagttataataatactggtttttaatctaataatagtttttaaaaatatgctagtctcttaaatttttgtagattacaaaaagtggagttataaaccagagttacaatgatcctagcttttgtaactccccatgtatttccctttactgagatctttatttttcatgtgacttcaagttcctgtccagtgtccttttatttcagctttcaggactctttttatatttcttgcagggcaagtctagtggtactgaactcacttagtttttatttatctgggaatgtcttattttctccctcacagttgaaggaccgtttgccaggtattggattcttggttaacaggtttttttgtttgtttctttcagcactttgaatatatcagcccactgccttctagcctccaaagtttataagaaattggctgataatcttattcaggaccgtttgcatgtaacaagtcactttttcttttttaagacggggtcttgccctgtcacccagcttggagtgcagtggtgcaatcacagcccactgcagctttgacctcctgggttcaagtgattctcccacctcagcttcccaagtagctgggaacacaggagcacaccaccatgactggctaattttaaaaattctttgtagagatggggtctcaccatgttgcccgggcttctctttctgctttcaagcttatctctttgtctttgtcttttgacagtttgattttaatgtgtgtgggtcttttttagtttatcctatctggagtttattgagcttcttggatgtttatattcctgtctttcatcaaacttgggaagttttggtcattatttctttagataatctctttacctctttctctctctctcttctccttctagaactcccataatgtttgttcacctgatggtgttccacaggtcccttggacttattcacatttctttaatcttttttttgttcctcagactcaataatttcccttgtcttatcttcaggttcattgattatttcctttacctactcagatatgccttcgaatccctctaatgaattttttacttcagttcttgtacattttagtggtaggtatttttatgtttctttttaggtttctatctatttattaatattttcattttgttcatgtatcattttcttgactttctccatgtcttcttttagttttttgaacagcttcaagatacttgttttaaagcctttgtctctaccatcaagtctttctcagggccagttcctgttgggttccccgccccccctttgaattggctatctttccctgtttctttgtatgcctagcagggttttgtttgtttgttttgttgttgttgttggaaacaggatgcttgaatctaatagtgtagtaactctggaaatcaggttctccctctttctcagggtttgctgatttctgattttacttttgttgtttgattgtggtaggctttgtctgtgtcagggggtctgcctgatgtgtaagcttaagtttttctcaggtcttttttgagcctgcacctttcattgggtgtgtgtggtaaccttctacattcccctgatatgtggttacttttgaatgtcctagactttaaatatctgtcttctgaaagtgggaaaagagaaaaatgaagaagaaaataaaagcaaaaaaaaaaaaaaaaaaagaaaggaagaaaagtgaattgccctttaaattccttgcaagttgcttcagcctgaggggaggggtttgtaactgtgctaagagggttgcaacaatggctgcctgcctatgtgtttgtatctccaagatcagaacagcaaccattgatcaaagcacagatccccagatttttggaggacgggatcctcatcccacaggctttgtgtaagctgatcctggagcatgtgcatagttgcccgccatgaggctagggattggttagctgctacagttctaggagctgaaactgaccaaaattgactgcaatttactgtccaatccttcagatagactacagaatttcaaaatagttacactagacccattctgccagtgcagttgttgccttcgtgagaacacaggttcctagtgcttcctacttagtcatctttcgagaattctttcactggttttgttttgtttcgatgctttattaataaaaattggcattatatttgaaataagtaatccattgctttaaagatttggaaaaacaattgccttggaaaaactagttatgtttattctttcccccttagtgctgtcaaaaatcggataacatagagacaaatctctaagcagaaagttttatttaggaatatatatatataaaaacagaattgtaaattgggatatatgcaaagaccagagtggtttttggtatgtccaaagtacaaaggaaatgttgggattttactgggaaagagaaatattacataaaatgttttgaaacaaagttcattaaattacaggtcgtttcagcagctactaggtaaaactagtcttaaggctatgggaggttatttcagcagctgggcttgtgagacagttcctggagctggcactttgtgtcctgagtgctttttccctgggttccttgactctgatttgcttggatatgacaggaataactccaattcctataatcagtttttgcagtgccttaactcttgtgttttagcatttgtgacaggcagattaatggcccttcaaagatctcagatcctaattcccagaatctataaatgctatcttgtaagggaaaggggatctttgtagatgtgattaagaatcttgagttggggtgatgattatcttggcttagctgggtgggccctaatgaaattgcctatacaaaggaggcagagggagatttgggagacagaagaaaagagtatgaccacagtgacagagattggagtaatatagatatggtttgatatggtttggcttgatatgatttggctgtgaccccatccaaatctcatcttgaattgtagttcccttaatccccatgcatcgtaggacggaactggtgggaggtaattgaatcatggggggtgatggttttataaggggcttttctccctttgcttggctcttattctctctcctgctgccctgtgaagaggtgtcttccaccatgattgtaaatttcctgaggcctccccagccatgcagaactgtgagtcaattaaacctcttttctttacaaattattcagtctcgggtatttcttcatagcagcatgaaaacggactaatacgcagctataagccaagaaatactgacagccaccagcaggtggaagagatcaagatgggattctgctgtagagtctctagaggtaccttgctgacactttgattttgatacccttgatactgatttcagacttctgacttctagaactatgagagaatcaatatagtaaaggtaaatcgtgtgctccttgttatcagcatctcttctatttagtattaccttttccacagagtctaactcattgccttcagtattataactgtgtttcaattacgtattgctgcatgacaaacaaccccaaaatttaatgacttaacaatttatcatttctcacaattctgtgtggcaggcgggtttagctgggcagtccttcttcgccatgtgttgtcatctgggatcactcaggtggctgctttcatctgagacctcagctggggctgatagaaccaacatggcttcacactcacatttctggggctggaagtagaagcataaatgactgggggccaaagtggcctctctctagcagggtagtcaggacttcaagagggtgaacccagaagctgccatgctttgtaaagcttaagccagaactagcacagtgtcacttctgctgcctgatcaaagcaagtcatgaggcatcctagagtcaaggaaacgggaaatagacccacttcttcgaaggaaggaggcacttacatataaggaacgatagaagtttgttgaccatctttggaaaaagtctatcagaaactgtttagtaaatgattattgaattaaactataacagttaattgattctgagattttagaaatgattttttaggaacattttctaaaaaagaattcctagttaaaaaatacccatgtaagctgcccaaatgggaccttgcacacatgaagaattcaagagattgatatttactcaccaactcactgtgtaaaggagtggaaatgtgtttcctggcccacctttgggccagtgacttcacagggggcgtggcagggctcttccaggaccaagacctttcacttccctgtctcaggatagtattgtaataggcagtttagtgatttgggaattctccaccttgaaagcaacttctgaaagggaaggattagaaaaacaacacgtcattagacaggcatgacaacatgtgcctgtagtctcagctacttaggaggctgaggcaagaggatcacttgaacccaggagtttgaggctgcagtgagctctgactgtgctaccgcactcttagcctgggtgacagagcaagactctgtctcaaaaaaacaaaaaacaaaaaaagtccaaaaatcctatggctacctacagaggatcggcagggaaacaaggatactggttggagccctgatcagtcagtgtgctcaaaacagaggccccgaggaggatgctttccttcaaacatggtctgcctgaaagggcttcctggtagatccatcgctatgaatacacagacttcctgagtgtgagattctgaccacgggactcctgacatctcttttctgatcactcattgttttgttaactactctagggagaaaagctagtgtcagcccagtctgaggtagggattggattccaagaacagaatctgagaggattccaagagcagaatcagagatgggcttcctgatgggatttcaaactgagatttctttttattagttgtttctattttattagtttgcatttgatcatatcctttgaaacgcatgtgcatgctttgtcttctttgtacgtttgtttcctttgcgggggatggggggattatttttcttaagatgaggttgctgtttttatcagcaatcactgtggtgaggagacacaggccgttagatgatttctctcttgtggggtggttttataggccagaatctagggaatagctccgttttaatagtttattggcttcccgattgaaatactaactgaaaacccccaggctttggccttcagcatttgttttcatccagtgaccagatttatggtgtttgctccatggcctgtgaataagtcctgtttttaaaaactggacacaacccacacctttactactgtttcctatgcagttccttactcctacatggtggctttgcttgcctttgctagcttttctttttatacctctgtacattactctgttgatccctattcctgagatgatcgagaatgatatgggatgtgtgtataagaaatgggtgtgtgtggatacctccccccccacctttttttcaacacgtttcaccagatgcctttttcactgcacaatagttttcactggtatactttttgttcagaagcatgtgcttctggcattgcaacttttcatatgtgtggcagatcttgaagacagggtttctatgagaaattggagcttggtttaaattttttctaggctgttagatggcagattggattaaaagcctaccaaaatggccaaagctcagatgctctaaaaactcaagaactagacccttggcattaccaagattagatgtggaatatgcagacaaattgaaatagctggagtagcagcgttccacctatggcttaacccagatgggagtaagttgttcttggtgtcaaggttagtgctccggaggaatgtatggccagacaaatgttcacacacaggagaggcacagagagtgtaaaacacagagactactatgttaaaatggcttcagattgatatggaaccattcttgatatgctagtaagtgcagtaagctgattataggacactatatgaggagggaggtgtagatggacctacatcaaaacataaaactggtggctaaatttagttggtaagttcgtggtgatttttagatttctctttgtggcattctttattttttcctcaataaccatatagtgctagaataatatttctaaagcttttaaaataaaacgaaatggtgcctggcaggtgttttctttgattcagtaaacctctgttgctgacctgttttgtccaggccctggctgtgggctctgtggagtctagcaatgaacggatcatgccaagggttgccttgttggtagaggttaccgccactcttgctctctgcaccttatgctttgtgctaggcaagtagagatctgcaagtagcttctgtgtttccccaagggcctctcatcagttgtgcctgcatatccttacctggtgggagagggaataactcaccttttgcatagtctgacagttctgaatttaaagctgcttcattctcactctttatcctgatttgtttgttttcacctgtctgttttatcccattcacaatttttagtggtctccttttttcttcctaggagcttgaacttacagagcttcagtttttcctttttggctatcacttttattgttttccaggctggtttttgatcacatagataaacgtttgaaatgcctgtcactggagaatttacccccagggctcgctatatctgcagtggtaacttattagcctgtttgcttgtttcggtgaactagaattgaactgtttgtaaaccagtgagacaagcgttatttatttgtgtttaagaacatttcaagctctggcagggtactcattttattaactcaaatgatgattctgaatgccactacatttatacctgatgatgcattttgtgaaattattaatgtgttactatcttggtcataattccttttctccttgcctgtcttaaggactctgtccttgtgtttcgcttcactcactcggcaactgtttagtaggcaccagctgtaaactgggcattatactcagtatcttaaatattgtggagaaaatgaagtcagctatggtttcttcttgtgcagagtgtataatctagtgggcaaaataagcaagaaaacaggaagtttcatgtatgacatgctgcctgtgttagggaaagcaaagggtgtagtgtacaaccgaggacaggtacctaagctagacttgagatatcagggaatgtgtcctggaagaagtctgcctaagcccaaagttgaaagattatttggagttagtctgacaggaggggtgcggtgggcagcagaggcggagagtggaggtgttcctggcagaaagtacaatatttgccacaatctagagggtagagagagcatagaatgttgatggaactagaagacatggtccttaacctacagaaatctgtgctctagttgaggtgataagggacacatttagtgaaggtccatggggtcaccatgtttctactctctagcctagtccatctgctcttgtaacatatctctcctgttcagaaactgtcaaagcccataagacagcaaagctgcttagcttggcattcaagtttctaaaaaaaattaatgccagaaaaaaaatttttgtaccttctttcgtcatgaagtcctcttgtcatccagtcagcttaagtacttttcccttgcatgctgtcttctctcctttttaatccagtcttactaatttttcaaggctcattttggtttccattttcttttttctgtctttgcaactccgagtctccctctgtcgctcacccaggctggagtgcagtggtgtgatcttggctcactgcaacctccgcctcctgggttcaagcgattctcttgcctcagcttctggagtagctgggattacaggcacgcaccaccacgcccagctaaattttatatttttagtagagacagggtttcaccatgttggccagagtggtctcaaactcctgacgtcaagggatccgcccacctcggcctcccaaagtgctgggattacaggtttgagctactgcagccggacttggtttccaatttccccacaaaactatccataatgatgtccccgacccaaatgatatattttccaactccaaactcttattgtaaatatcattcacttgactattaaaatggtttgccttatgctattagttatattgtatgtgaatacctgtcttcttaaccaggttttaagctccaagagcactgactctcttttactcttagtatctcccataggattgcgcccaacatgaagcatgtaggtactttaaaaaaatatttgctacttttgtgaaaaaaatacgatcacattacagttttgattaagtagcaagtgagagagaagactcacctattctaggattcagagcagggagattcaaatatgacctaaaatggtcctatgatcttggccttttaaagtaaggctagattacagaccttacatgggcagtccaaaacctatgaaattcttttatatggagacactattataaatggtgattcttctctcagtacaaccatgaaaactaatatggtcatggttagttgaaggctggtgttgatatcagcctaatttctggattcaagatgctgtagagtctacagtagaccttttagtgtagttgagaatcagaagtgagtgaagtttggataagccccttaaataattctggttctcctaccctctacctattgagagtctgttttataatacacaagaattgttaatgttgcatatccttcagacatactatgtaaatatttaaccaagtctttactagcttttggctaatgcagagttgagatgatgctccctggcgagtacatggagctcagctcttttgtgtttgtagtaaattagaactctggccttttagctgaactaaaccagaaatagggttgacatttctgtgttgaggaacctaagaatgttagaaggacacttcctgtatgctcagagtgcttgaacaaggttgaaattttctgtagaaaataattttgatatttttaaaccctgacaaatgcatagttgatacttcaaagtccgcaccatcaggcatggccacaataattttaacagtatacttttgaaaagatgtagtcaaaaacctactttgctcttaaaaacaaaacaattacttaaaacgttcactgaagtttaattttcagtaagtaccttctttatatagcttccaagataaactagttggtaaatatttgctaaggtaactgcatgacatagcttgctgtttgggacaattagcttaattcaattaaaagaatgactttaatcctagaatagtagctccactgcccttttctcagagtggtattatggtcagcagagccagttatctattaggcagtttctagatcatagtgatagaatcatacggtgtgcataagtgagattacgtgtgtttcttactcaaccaagaaatagcagaccacttatttctctggaaattaataactgattcctcaagaagacatatccattgcctttctgtttgtataatgagagattctgaatgagcaaatatactcagggatcccaatactaaactcaaagatttacctttaagtgacttctcttcacagaatcaaaagccaaggaaaggacattaacagtggaaattgatgttcttgaccagttttgctctgaggtggtcaagaatataacaatggcctgtagtggaatgattttgctttctccctgtgtaaaacagtgatcctgtaaaacccaagtttgtaatttattaacaaggaaatgtacatataatcatttgtagctgcaagagactagcaataaccaaaaggcttgtcattagggattaagtaaattacagtcaatcatgcaatagattactctgtagccattaaatggaagaaaatagatcagtgtgcctgacatggaataattttgcagattaggtgaaaaaaaactcaaggtgcagaaaagtgtatataatgtgattatttgtaaggaaaaaaactacaaactaaaagtatatacctgtatgcactgaattttttaaaataggaaagctgaaatgctattacacagttctatatgaggaaaggcactgtggggagtctagtgtgtattttttaacatttgcatttttactttttccattaaaatatctaataaataaaaaaggaaatgaacatattttggataaaatgttcaataaatatttaatgggtctgtaatttggaaaggagtaaggatttctttttttaaaagactttcgattttatgaaataggtaaaagaatatgtataaagtatgtataaggtttaaagaataacaatgcaataaacaccttggatctaacacctagtttaagaaatagaacattacagtagtcttcccttatctgtgggggatacttttcaagacccccagtggatgcctcgaaccatggatacgctgaaccgtatatacactatattttttcctatgcactcatagctgtgatgaagtttagatattaggtgcaattagagattaacaacaataactaataataaaatagaacaactataacaatatgccagcatcacactcttgtgctttggggccattattaagtaaaataaaagttccttgaacacaagccctgtgacaccaggacagttgatctgataagagttggctactaaatgactaatggctggtggcatatacaacatggatagctggatagagagctgattcacatcctgggcagaatggagtgggacagcatgagatttcatcaccctactcataatttataaattaggcacagtaagagattaacaacagtaactaataatgaaatagagcaattataacaatatactataataaaagttaaacgagtgtgatctttctctctctctctccgtctctctcaagatctctctatagatctaaatatctaatggcactcagtttaaaacttatgaattgtttagttctggaattttccgtttaatattttcgaaccatgtttgaccaagggaaactgaaaccaaggatgaggatatctatggtttcgctttctgtgatttcgttactggtcaccagtggttcaaaaatattaagtggaaaaaccagaaagagacagttcataagttttaaatgctacgtcattcacttcactttatcttatcacataggcaatttatctcacatgataaaatctcacatcatcacaagaagtaggatgagtacagtataaggtatatatatagagagagaccacattcatttaacttttattacaatatattgttataattgttcaagtttattattattgttgttaatctcttactttgcctaatttataaattaaactttatcacagctacgtatgtacaggaaaaagcatagtatatacacagttcagtgctatccagtttcaggcatccactaggggtatggaaatgtatcccctcagataagggggggactactgtaatgttccacttctttagctaggtggtagatccaaagtgtttattgtattattctttaaagctcacatacggggactactatactacagtttactcatgttttgttgatgaacaagtggctgctgtgcatatgcttgtacaagccttctgatgcccgttttcaagagtttatctaggccatttaccttggagtagcattcttgagtcactaggtaaacacatctctgactttcaagaaaatcctaaattatttttcagaactgtagtaattttcatttccatgaacagtattctgaaagattcaatacgtggtattatcagacttattagtctttgccaatttgagggtataaaatagtctcttggcatagtttgggtttttttttttttttttttgagatggagtcgctctgtctcccaggctggaatgcagtggcacgatctcggctcactgcaagctccgcctcctgggttcacgccattctcctgcctcagcctcccgagtagctgggactacaggcgcccgccaccttgcccggctaattttttttaatttttagtagagacggggtttcactgtgttagccaggatggtctcgatctcctgacctcgtgatctgcccatctctgcctcccaaagtgctgggattacaggcgtgagccaccgcgcctggccatcccttggtatagttgagcatcctttctactgtttcttgaccacttatgtttattttctgtgaatttcattttgataggtgtgtccatttttatattatttgtcctttattcagtgatcacttgagttctttgtatattctggatactgattatgtaattcttagatatatatatacaaatgttctccccatttgtggcctgtatttttatttttaatttaaaaactttattatccagagggagacactatatcttccaatgctgttcattatataaacatccttgaatagagtccggaaagtccagaacaaaaggcagtcagtgcttcactttgcaatagtggcacagtggcagtaactcatcttgtctctcaacagcatctgtctcccatttctggtgaaaattctagtgaattctcccatgaatacatcacactgttggctccttcgattaatctaagtgatgagttggcaccaaatccattcagtttgtctcatacaacatttaattaaggttactaccagtaggacaccaagcagcaggatgagctcagctttcagtattgacatcaactatgccacccagcatctcagatccaatcacttgtacaaatcccagaaaccaacagggtctatggtagaaactcaaaaggctgtcttttgaagtttttgtattgacctttccatttagtccaagccattaagccaggtacagcagaatgtattagtgattatacagactttatcttatcttatcttaacctgtagattggaagtctaagaaaatttttcatttatattgttatgacttgccctgtgaattgaagcaaacctgagtggctttatgggctgaagtgctatcagtgattacctcagttaaaatcagctgataaattttgtaccatgtttttaattgaatgactcttatagcaggagtaaccaaccacagggtgtgcaaaaataatgagttgcttatatctctgggaagcttctgtgaataaccaagcataaccccattttggagagatcttcgtagacatctgagagctatatgacctactggtggtatttccttaaacatttgaaatttgcttacagccacccctaaggtgcaaatcaccgtgtttggttgggggaagagttaatgcctgctttcacaaaagaaatagagtcccaaggacacacttagtactcctgtaaagaaagcatttgtttacagtttggggagatccctacgtcagttgaggagcatatgttgatagtgcctccattgaacaatcagctggtaaatcttaaagtttctagtttagtccaaagaatgtattctagtccttggttttggaaggattgcttaagtacagtcattccaacctatccagttctgcccacaccaacagctgagtggcattcagctgtcccttgaaatgattgagctatggctacagaaaagggaaggacattcagagatattgacaggtgcttggagccaaggccataacatatagtttctgataggcttctcagtaaggttaaggggaaagcaatcaaattgtgcttcaggtcatctgagggaggctcacagacccagcagttggttaaatttaatgtgctcatgacagtttgggggaagagcagagcattttccttggtgaggaaggctcttggggcaatttcaaaaaacagacaccatttatgttcttcctcccattgtacctcccggggtctgagatagtctcttcccaggtgtcaaggttattctctctacttcctcaaaatcagttctcccatttcaatatttataactttgtcttttttccagttgctccctacttgcaaccagacgttttgtctagaatagtcaggtacaagagaaacaaggcatttttataaattttacagagaccctttatgtactcatgggccactttaggaagactcaacaagctgtgtactcaagcaagtagtcattatcttatgatttagaactaggttaatccttttaagagaatccaggtggctaaatagaattaagttagaatttcctagggctcttttggccaggctgccacatggaaggtgtactaactaggctgcctggatttgtcattaggggaaagaaagaaagaagcattatgccaggaatgctcagggcagaatcccaaattttcaaaataggttaaaaaaaaaaccctcatgcatttcttttttcttttctttctttttttttttttttttttgggggcaagttctcactcttgcccaggctggagtacagttacacgatctcagctcactgtaacctctgcctcccaggttcaagcgattctgtcgcatcagcctcctaagtagctgggattacaggcagatgctacctcaactggctaatttttgtatttttagtacagacaggatttcaccatgttggccaggttggtctcgaactcttgaactcaagtaatttgctggcctcagcctcccaaagtgctggaattgcaggcatgagccaccttgctcagccctccctccctccctccttccctccctcccttccttcctcccttccttccaggagtctcttgttgcccaggttggaatgcaatggtgcagtcttggctcacttcaacctccacctcccagattcaagtgattctcctgcctcagcctcctgagtagctgggattacaggcgtgcaccaccatgcctggctaattttgtattcttcttttagtagagatgggatttctccatgttggtcaggctggtcttgaactcccgacctcaggtgatcctctcacctgggcctcnnnnnnnnnnnnnnnnnnnnacagtcgtgagccgctgcgcctggcccctggctatttgtttatgctgttttaaagccttgaagtcaatggaatttaatttgtatacgtagtagtgaaacaggaaaagttcccttgtcccccttgcagggtgtgtgagtccccctcacaaggtgtgtgatgggattgtagctcgcttcttagcgcccagctgctcaaacctgtaggggaacatacagacaggcaggctgtggggctcccactccacagcagtgtcgaggggtgaatgtttacggctgaagccccagtgggtgtgtgttacagagtgctctttcagtttagctgtccataggcagcttgtgttagtcagctcaattagacccccttgccttgttgcaaggacagagggctttctgtatcccagggttcttgccttgatataccggaagaatttgatcacacgtaggcttggagaattagtccagggttttattgattggaagtagctctcagcagatgggggaaccagaagggagatggttttccgctggatttgggccactcggcggcctgtctcttttctgactgccctggccaaactcctcattgtttcgccagtcgatggcctgctggtgcctgttggtgtattcctgccatccagccgcttgtgtgttcctccgcccatgtgcccctcttgtcatccagccgcttgtgtgcctgcgtgctagggtcttgggggattttataggtacaggttgggggcatggcgggccagggtggtcttgggaaatgcagcatttgggcacgaaggcaggagtgcctgtcttcacctaggtccgtgggcacaggccggagacagagcctccttcgccaggaaccagcccttctcctcccagcacttccctgccctcttctcatatcagtgggagcttgggatccaattgtaattttgtctgtgtggataatcagttaccacactacgtttctctgtgatctgcagtattagctcttacacaaatcaagttttatacgtgtattaatatatgtctgctcctgtgctttctatgctattttattggcttacttgtactcatagtcctaattacatgagtgttatggttttttttagctatctgggtgagtcctccaaccttgttcttctttaagattatctttgctactcttactcttggcccttgatgtgtctatatacaatttaaaatctacttctcagggctgagcgcagtggctcatgcctgtaatcccagcactgtgggaggcagaggcaggccaatcacctgaggtcaggagttcgagaccagcctggccaacatagtgaaacctcatctctactaaaaatatgaaaaattagccagatgtggtggtgcgcacctgtagtgccagctactcaggaggctgaggcacgagaattgcttgaacctaggaggcagaggttgcagtgagccgaaattgcaccactgcactccagcctgggcaacagagcaaggctctgtctcaaaaaataaataaataaaatgaagtcttgcagacacacacacacacacaattactgtttttattggaattgcgttgcatttataatcaatttggggagaatgtcatctttataatatggaatcctctcatctatgagcacagcacatctcctttttttgtttgtttgtttgttttctgaggatggagtctcactctgtcgcccaggctggagtgcagtgacgtgatcttggctcgctgcaacctctgcctcccaggttcaagtgattctcctgcctcagcctccagagtagctgggattacaggcatgcaccgccacacccggctaattttatatatttttagtagagacagtttctccgtgttggtcaagttggtcttgaactcctgacctcaggtgatccacccggctcggcctcccaaaatgttgggattacaggtgtgagccaccacacccagcagcacatctcctttttaaggcatatcattttttttttccaaaaaaaatctcccgattaaaaatatgaaataccaatgtggaaaaaaagaaccttgacctctatctcacactatacacaaaaattaattttaaatggatcatagacctcaatgtaaaagctaaaaccataaagcttctagaggaagatatacgatatctttcttaggtaggtagagatttcttaggcatagaaagcatgaatcataaagaaaaaaattgattaaatagtgaactttgtcaaaaattttaaaattctcctcatcaaaagacattattaaataagttggcaagccacagactagaagaaggtatatgccatgcatatatatgaccaaggaaaagcaacctattaaaaatgagcaaaaatcttgaagagatccttcacaaagggtcataataatgaccaaagcacatgaaaagtgctcaacgtcattagtcgtcaaggaaatgcaaatcaaaatcatgggagatacactgttgcatacccacaaggatggctacaaaggaaggaaaaacaaaacaacagcaaatgttcaaaggactgtagaaatctccatcagaaatctaccttactgttgggagtgtaaaatggtataattatttcaggaaactgtcagtttcctaaatggttagacatgttacagttttattctcggatattaatccaggagaaatgaaaacgtgtccttaaaaagtcttatattagaattttatagcagctttattcataatagtaaaaaaaaaaaaaaggtaaagaacccatgcctgtcaagaggagaattaataaacaaacttacagattcatataatggaatactactcaacagaaaaagaaccagactattgatatattgaataacatggataaatttcataaactctgtgctgagtgaaaaaagcaagccaaaaaaacgtattattgctgggcacagtggctcacgcctgtaatcccagaactttgggaggctgaggtgggcggatcacaaggtcaggagatcgagaccatcctggctaacacggtgaaaccccgtctccaataaaagtacaaaaaattggccgggcgcggtggctcacgcctgtaatcccagcactttgggaggccgaggcgggcggatcacgaggtcaggagatcgagaccatcccggctaaaacggtgaaaccccgtctctactaaaaatacaaaaaattagccgggcgtagtggcgggcgcctgtagtcccagctacttgggaggctgaggcaggagaatggcgtgaacccgcgaggcggagcttgcagtgagccgagatcccgccactgcattccagcctgggcgacagagcgagactccgtctcaaaaaaaaaaaaaaaaaaaaaaaaaagtccaaaaaattatccgggcgtggtggcgggcgcctgtagtcccagctacttgggaggctgaggcaggagaatggcgtgaacccaggagacggaggttgcagtgagccgagatcgcaccactgcactccagcctgggcgacagagtgagactccgtctcaaaaaaacaaacaaacaaaaatgtattattacatttatatgaaattctagaatagacaaaaccaaactgtaatgatagaaatcaaatcagaggttcctttgtggggcgggagtttgctgggaaggggcatgggggatctttatgggatgatggaaattttctgagtcttgataggggtgtggattacgagtgtatgtatgtgtgggttgaatggtacacttgatcacagcattttgctgtgtgtaaaaacgtttcagtttttttaaaatgtgatattctggatttcaattaataggaacataacatgtagagctgataaaaatgggtaggttagggaatatttatgtcaccccttcggagtaattctttaatagttatggagacagtttgttcctaaatgccatatttagcttgagctttttggtcagtggtgcagcctgaggaactattctactttcgtagttcaagagaagtttttataaagttgaaaaagataattcttacaagttcagcaaggattagatttccagaacttcacatgccaagactgtacttctcataaccatactccaaaccagtggttctcaatcaggggccattttgtcccacaaggtatatttggcaatgtctaaagacattttcattgtcatgattgttggggaggggtgttgtgctgctggcatctagtgggtagaagccacggaggctgctaaacatcccacaatgtgtaggacagtcccctgaaacaaagagttatttggtccaaactgtcattggtgccagggttgggaacgcttgttctagacctgtccttatcactgaagctgagtcagtctcagtcaatctggtgttgactctacttatagtccaaatcagttgtggaaacttggcattggcacagattacatatttcttccctgataaaatttaatatcaaatatttgtaaacatacataatcttaaattttgagataaaagttcatggattgagagcacttcagaaatcagaattaccatttgtgttgattgttaaattcttaagatgctgtagattctgtttttaactgtatttaattaaatatccaaacaaccgtacttatcttcctttttttaaaaaaaaggctttattgtcagatcaaagggaataaatgataataaattttttcctccttctttcacagaatgacagggagagagtttttctctcgtttcccagaactctatccttttcttctcaaacagttggaaactgtagccaatacagtagacaggtaagaagagaattgggtggggcaaaatgacctcaaggatgtgaattaccttagtaattgagattttccctctaggcagctgtttttaataaaattcttcccttttttaaatttgtttaaattttttccttgagacagggtctttccctgtcacccaagctggagtacagtggtggccaccactccttgcccatttttgtattttttgtagagatggggtttcgtcatgtttcccaggctggtctcaaactcctgagctcaagcaatctgcccacctgggcctcccaaagtgtggggattacaggcttgagccactgtgcacggtcagactgcttccttgcataaaattggcttttttattaaagtgcttttttgtaattatatcatattgcttggttctctgtagtaaatttgtacctgaaaagttgtgtaaaatcctgtctttatattttaaaaatgctattttatgttaaattttatcaaacttaattccattttcggtggtacagaaactaggaatcacatggtgatttcttctgttatgaattattttcttcctatttttaaaaaaatctgtgtttacatattgagtttgctttatgcatacctgtcattttttattactggcttgttgcaacttaccattgtgaaactatagcgattagctgactaatatgatcacttgtgttcagaaatggttcttgtctacctgagcagaaatggccagtgttcttggaaacacagagcaaagccattacgagggctttccagtcttatagttcaccattgtcttaaaaatcacattctggctggtgtggtggctcacacctgtaatcccagcactttgggaggccaaggcaggtggatcacctgaggtcaggagttcaagaccagcttggccagcatggcgaaaccctgtctctattaaaaatacaaatattagccaggctggtggtgcgcacctgtgatcccagctacttgggaggctgaggtaggagaatcacttgaacccaggaggcagaggttgcagtgagctgagatcttgccactgcactccagcttgggtgacagaaaaatactccgtctcaaaaaaagaaaaaaaaacacacacacacattctgaagctggtagtggaatttttagtatggacatcataaagcatgtcttttgtatttttcctataattttgcacttggtatgaatgtacactaattgtttataattagaaaataaaagtaatgaattttacttctggttatgatgcatttgctcacattagtagtttatgctaatgtgcttttctggcctttagtgactattcatgctttcttaaatacatttggatgttgaaagtttcacatttcatactgtggaacaggcacgtctctactgtaggaacagttctaatcaaaatagcgtactctaattatgtaaatgataagctttgagaagaggatcctgtacgaaagcccatttccctgttttgctagtagttttttcttatgatgcacatttgggagataagaagtgaacgtagaaaaaaaaaagaaaaaaggaaaactatccccttgattgtggagtctcacttcatatacataattttgtttttgaaatggagtctcactgtgtcacccaggctggagtgcagtggcgtgatcttggctcactgcaacctccgcctcctaggttcaagtgattctcccacctcagcctcccgagtagctggaattacaggcatgcgccaccacatcggctagttttttgtattagtagagatgaggttttactgtattggccaggctggtcttgaactcctgacctcacgtgatccatccgcctcggcctcccaaagtgctgggattacaggcattagtcaccgcacccggccatatacataattatttcatgagaaaaatgtttgaaggaggagtgcttcactacctaaatgtgaaatctttcatgtgtaataattgttgtttcagtgatatgggagaaccaaatcgtcatccaagcatgtttctcttacttttggtgttggagagactctacgcttccccgatggatggtacttcttctgctctcagcatgggaccttttgttcccttcattatgaggtagtgtcatgctgtgnnnnnnnnnnnnnnnnnnnnnnnnnnnnnnnnnnnnnnnnnnnnnnnnnnnnnnnnnnnnnnnnnnnnnnnnnnnnnnnnnnnnnnnnnnnnnnnnnnnnnnnnnnnnnnnnnnnnnnnnnnnnnnnnnnnnnnnnnnnnnnnnnnnnnnnnnnnnnnnnnnnnnnnnnnnnnnnnnnnnnnnnnnnnnnnnnnnnnnnnnnnnnnnnnnnnnnnnnnnnnnnnnnnnnnnnnnnnnnnnnnnnnnnnnnnnnnnnnnnnnnnnnnnnnnnnnnnnnnnnnnnnnnnnnnnnnnnnnnnnnnnnnnnnnnnnnnnnnnnnnnnnnnnnnnnnnnnnnnnnnnnnnnnnnnnnnnnnnnnnnnnnnnnnnnnnnnnnnnnnnnnnnnnnnnnnnnnnnnnnnnnnnnnnnnnnnnnnnnnnnnnnnnnnnnnnnnnnnnnnnnnnnnnnnnnnnnnnnnnnnnnnnnnnnnnnnnnnnnnnnnnnnnnnnnnnnnnnnnnnnnnnnnnnnnnnnnnnnnnnnnnnnnnnnnnnnnnnnnnnnnnnnnnnnnnnnnnnnnnnnnnnnnnnnnnnnnnnnnnnnnnnnnnnnnnnnnnnnnnnnnnnnnnnnnnnnnnnnnnnnnnnnnnnnnnnnnnnnnnnnnnnnnnnnnnnnnnnnnnnnnnnnnnnnnnnnnnnnnnnnnnnnnnnnnnnnnnnnnnnnnnnnnnnnnnnnnnnnnnnnnnnnnnnnnnnnnnnnnnnnnnnnnnnnnnnnnnnnnnnnnnnnnnnnnnnnnnnnnnnnnnnnnnnnnnnnnnnnnnnnnnnnnnnnnnnnnnnnnnnnnnnnnnnnnnnnnnnnnnnnnnnnnnnnnnnnnnnnnnnnnnnnnnnnnnnnnnnnnnnnnnnnnnnnnnnnnnnnnnnnnnnnnnnnnnnnnnnnnnnnnnnnnnnnnnnnnnnnnnnnnnnnnnnnnnnnnnnnnnnnnnnnnnnnnnnnnnnnnnnnnnnnnnnnnnnnnnnnnnnnnnnnnnnnnnnnnnnnnnnnnnnnnnnnnnnnnnnnnnnnnnnnnnnnnnnnnnnnnnnnnnnnnnnnnnnnnnnnnnnnnnnnnnnnnnnnnnnnnnnnnnnnnnnnnnnnnnnnnnnnnnnnnnnnnnnnnnnnnnnnnnnnnnnnnnnnnnnnnnnnnnnnnnnnnnnnnnnnnnnnnnnnnnnnnnnnnnnnnnnnnnnnnnnnnnnnnnnnnnnnnnnnnnnnnnnnnnnnnnnnnnnnnnnnnnnnnnnnnnnnnnnnnnnnnnnnnnnnnnnnnnnnnnnnnnnnnnnnnnnnnnnnnnnnnnnnnnnnnnnnnnnnnnnnnnnnnnnnnnnnnnnnnnnnnnnnnnnnnnnnnnnnnnnnnnnnnnnnnnnnnnnnnnnnnnnnnnnnnnnnnnnnnnnnnnnnnnnnnnnnnnnnnnnnnnnnnnnnnnnnnnnnnnnnnnnnnnnnnnnnnnnnnnnnnnnnnnnnnnnnnnnnnnnnnnnnnnnnnnnnnnnnnnnnnnnnnnnnnnnnnnnnnnnnnnnnnnnnnnnnnnnnnnnnnnnnnnnnnnnnnnnnnnnnnnnnnnnnnnnnnnnnnnnnnnnnnnnnnnnnnnnnnnnnnnnnnnnnnnnnnnnnnnnnnnnnnnnnnnnnnnnnnnnnnnnnnnnnnnnnnnnnnnnnnnnnnnnnnnnnnnnnnnnnnnnnnnnnnnnnnnnnnnnnnnnnnnnnnnnnnnnnnnnnnnnnnnnnnnnnnnnnnnnnnnnnnnnnnnnnnnnnnnnnnnnnnnnnnnnnnnnnnnnnnnnnnnnnnnnnnnnnnnnnnnnnnnnnnnnnnnnnnnnnnnnnnnnnnnnnnnnnnnnnnnnnnnnnnnnnnnnnnnnnnnnnnnnnnnnnnnnnnnnnnnnnnnnnnnnnnnnnnnnnnnnnnnnnnnnnnnnnnnnnnnnnnnnnnnnnnnnnnnnnnnnnnnnnnnnnnnnnnnnnnnnnnnnnnnnnnnnnnnnnnnnnnnnnnnnnnnnnnnnnnnnnnnnnnnnnnnnnnnnnnnnnnnnnnnnnnnnnnnnnnnnnnnnnnnnnnnnnnnnnnnnnnnnnnnnnnnnnnnnnnnnnnnnnnnnnnnnnnnnnnnnnnnnnnnnnnnnnnnnnnnnnnnnnnnnnnnnnnnnnnnnnnnnnnnnnnnnnnnnnnnnnnnnnnnnnnnnnnnnnnnnnnnnnnnnnnnnnnnnnnnnnnnnnnnnnnnnnnnnnnnnnnnnnnnnnnnnnnnnnnnnnnnnnnnnnnnnnnnnnnnnnnnnnnnnnnnnnnnnnnnnnnnnnnnnnnnnnnnnnnnnnnnnnnnnnnnnnnnnnnnnnnnnnnnnnnnnnnnnnnnnnnnnnnnnnnnnnnnnnnnnnnnnnnnnnnnnnnnnnnnnnnnnnnnnnnnnnnnnnnnnnnnnnnnnnnnnnnnnnnnnnnnnnnnnnnnnnnnnnnnnnnnnnnnnnnnnnnnnnnnnnnnnnnnnnnnnnnnnnnnnnnnnnnnnnnnnnnnnnnnnnnnnnnnnnnnnnnnnnnnnnnnnnnnnnnnnnnnnnnnnnnnnnnnnnnnnnnnnnnnnnnnnnnnnnnnnnnnnnnnnnnnnnnnnnnnnnnnnnnnnnnnnnnnnnnnnnnnnnnnnnnnnnnnnnnnnnnnnnnnnnnnnnnnnnnnnnnnnnnnnnnnaggtgttatcaccctcatttgcccgttgaggaaattgaggttcagagagcaaggcagttacagagctagaatttgaacccaagagtgcagggcttgtcaagggtgttagatgtactctttctgttataccaaaataaccttgttttttggttgccttttgagtagccagtaacttagctacacggaatggacctatagggtgtgaaatgtatgcaactgagagagatgaggagcctatatccacagctgctgtgtctgagtacaggctgtcttctggatatagacgtaatgtctctaccaatggtgggatctgttccttattttgcttttcctgtaggaaaagtgactgattggattggttaaccatgtgtggcacatggtgacaatcgcctggggttataggactggtttgtggccagatacagtagaagcctggctcttctttcttggccaccttctgtggtaaagtggaaggccctagatttagttagtttggggtttcatcagcctaccacagggaaaacccatgctaccccaaaatgttcactggcgaggtgaactataaacagatttttaaaaagcagtgaatgtgataaaactgtatgcatttgatttagatgacctctgagaatattattcatgaagaaagtggaaggctgatcataaaacctgtcattccaggcagtggttgtggttctgattgtggtaaagagtgggctgttttgacttggggtaatagctaaaaagatggatgggtgtatgcacagtgggtcagcagtgttttatttttgtaccgttgttaagggtaatttatgtacttggaagggttttcatcaggctcatggatactatgagtttggccaaagaaaaaaatttcagtttgtgggagtagtgcaaaggttgctctgactgctaaaagtgaattgcacaatgagaagaagattaaaagcgccaacaagagctttttgtttccctttgatttatgtgtacttacctgctatttccttcctctctgtaaggtatttataagtattatatgtagttttactcctttatcccatgtttaagagtatacctaaacatatatgccattatgattgttgcatcctcttgggacagaacttataatgtcaatcccaacatcttgtatacaacttttaaaaaatccagtgtattttatgttctgatgttgtgctgcatccagatacaaagccctttaccatgtgaatgtgatgctttcaatttaagaccattaattcattcttcagttcaggtaccacaaagcagaataattcatgctttaaaaagaaccttgactggctctctgaatgcagctcaccagggcctgcttctctgggctttctagagactagaaagtcttttcagaggccaaaaagtccctgggcatacatctctgagttccctttcacaagcaagtttcaagttccagtcaaagagctctaggtaaccacatatgcctcaaacctaggaccatagaatcctgaacaaaggcccaggagagcttagacgaatcaggtctcagaggccgaggcgggcggatcaccaagtcaggagatcgagaccatcctggctaacacggtgaaacctcgtctctaccaaaaatacaaaaaattagccgggcatagtggcaggcgcctgtagtcccagctactcgagaggctaaggcaggagaatggtgtgaacccaggaggcagagcttgcagtgagcagagattgtgccactgcactccagcctgagtgacagagcaagactccgtctcaaaaaaaaaaaaaaagaaagaaagaaagtaaagctacttatttggtaggtatatgaagtcaaaagactgatgctggtgacatagcttcaaatgctggaaagtccaagtgaaaattcttttgaggagatagggaaagaatctcttgcaactttatagcatgatgctttatgattatgctgttaatggctaaaagtagccataaaaaaaatgaaggcaagctagattgcatgcttatcaaatttgtgagcaaattaagattcaaaataaccttcaagcataggactgacaaacacaaattcaggcataagaccattacctctgaatggggaggaaaggggtgaaattgaggagccatgtactagaagctacaattttatttgtgatgtgttcttaaattgggcattgggcaaatgcttgaatgtcatcctattctctagattcttttcgttgttgtcatcattttgtatgtctgatgcagttcatcatttaaaagtaagattcgaaatagcctggaccagcctgggcaacataaggagaacctgtctctacaaaaaattttaaaaattagccagacttggtgatttgcgcctgtagtcccagctacttgggaggctgcggtgggaggattgcttgagcccaggaggtcaaggcagctcaagtgagctgtgattgggccactgcactgcagcctaggtgacagagcgagaccctgtcccccaaaaaagccttgaaagactggattgatgggatgagactatcaagataacatttaatagagatatatatcattctgattttttaaagaaaaggcaaaattatatacatacaaaatgagggctatctggcttcatagcagtttttgtgggggaaaaaatatcttggtgaatgagatatcctggtgaaccatgagaaagcagcatgacactgttgctgcttccagatagtggaggctgtagtccccctgaactctgttggttagcctaaacccacattattctccttattattctgttctgggctccccattttaggaaggtcactgaagaactagtatctgtcgaggggaggtgaccaagatgaggaggaaaccaaacatctggaaacagttagactggagaagacttagtggcaacatgataatggtctttatatacttgagagactgccatatggtagaaggcgcataatttctcttttttgctcccaatgggaaaatggaagatagatttcagcttttaatttaaagaagaattttgtgaaaattagtattctctatcaaggaaaagaacatatttccataatactgagtttgcccatcagcaaaagtgttaagttttcaaggaaaactgatcacatgttgagcatatatctgcagcgcacctgaggttggactggatatcatcaaggtatctgtttggcatgccttatttcagaataggtgaacaactcagctgtggattctgaatgttcagtgaatgaaatgatcaacctgcctctaatcctgtgacaatatttgtacatttttgtttatgggtccttcgatctctcaaagaaaagaagttgggatgccattcttggcatggcccaaaaagtcacagtggtttgctcttaaatggcaccctccaggaattaatctactaaaatttagcatttaagtaacttctgtaactgtgttctggatagttctgaaaacatatttttggcctatgagatgttatgtctgaaaagcattctttattaatttaattacctttttttgtggttcctgtatttttctccattccagatgttggcttaagccacattttctgacaagcaaaagaacatctgagtctttgagaagtcagagatgcttttctaaagagtggttatagtagataactctttattgtcccaatttcccaaagtatcttgaacagagttgcctggagagagagtacaggggtctccaagccttgctcattacaagtagaaacacctgagaaatagggctttgccagtactgttgacatagaacttcctgccctggccagcactctacctggtctgtggttactactaaattccatgaggttcagagaagggaattataggaaaggagtatgcccccacccttcccccgctgcccagccatcctaatctgctaacagttgttgggtgaaaaaagggttctgctatcccataattctgtggaaaccctggccccttggtttcactatgtgactgtctgataccaggtcaggcttgggaccagattgttgaggcacaggtgttcagtgctgctcagttttcttctttgcttataggccaaacttgcaaaacatgtaaatgcccccagtgttatcttccatggggtatttgtatattacagatacatacattttgaaataaagcagtaaaactctaatggtggcgttttaggccttatatagggaggatctagaagcagagattggaaggttgtttcctattgctggggaaatcacattgtttgggcagctacttactctgcctcctttttactgtgcctagcactttatttggagggctgtactcatggccctctgaatttctgaattctacccagggtagctgaggttcagcatgtagtatgaaattatgttttgcattatgtgtctttttttgcaaatagttctggcataaaaagataccttgttatctgtcaccaatttttatctgttagttcctagataggggcctggccaacttcatttctggtgccagatctctttaagaccattttctaaatatgtttttgagcagaaggaatgaggagttcacctcttatggaatgcattgacaaagcaaactagaaaaacagaacttgtagggaccagcttttcttcagtgttatctgttatcccaacaggccagtttaggtcatgttagaacaagtgatttgatctgcacacagtcccattcttaggtgaaatttctgacaatgatgataatctatggcctattgctgccattcatactagaagttagaatctaatcagttaattgagtaaccaagtatttgttaaacattcattgtgtacctagctagtgttaggtcttgggtaagatgcaaagtaaagaaaaatgtctttatgcttaaagaacttaccgtctagctaataaggtaaaatacatgcttgtgaacctgataccgtgtatattaaccacttaattatatgacatatacactaaggactgaggcctacaaagaaggggaagagcatcagtgggttggagaagtccgggaggctttcccaaatagcaaggcaggaagaaatgtgggagttcagtctgccatctcagggacttttagaaatcacccatggtgattaacaagtcatgtgagaggagtgaaaagtcagggggatccaacaaggggaagattgtgatggagagttttatgattcataacttggaaggcatcataaagagctttgcttccacttgaaccaagggcgacccaggaaattcacaaaataaatggtttgctatttaacaggagaaaccattgatggtgcacctttggtaactttaataaagaacagtatttgtcctgagtgttgcatttaagtcttgtggaagtaatgaattgtagtgggaaaaaaaatttaaatttagtaatacttaacattttaaagtatcttaacagtgtttttccatacagaacttttatttccttgttcttaaattgtttctcaaaaattgtagcaaaggtgctctgcaggcatttttaatgctgaattgaaggatttcacattaccaagccccaaatgctgactgataggcagtcatcctacacagtagagaacattttagatcaaaaatgtgtttttttcttccagaagaaaataagaattgggaaatagaataagaaggtaaagataaattatagaaggcttcaaatgaggacaaggaaaaataatgacatagtgtgtttcggttagctttctctgactggaatgggttttccctttccctctgggccttggcccccaccgtctatttctaatcttctagtaaaaacaagctacacatgttacatcagctgctcaggataccttcaccctcacgtccttttactttttccttcctcactcactttgaacattgtgactcttgactgctcatcttgcctcccttccaaccagttatagacattctcttcttcaccatttattcttctctgtctctttatattgtgatcactcttcatcaccagttcatccttccattaagtgtatttactgagggcctactttgtgcccttgcccaacccaacacccctactctcatcacctctcatttgcaagagaagatgtggaggccatcaggtgtgggttctgtccatggagaaacccactccacccacagtcctctcctttgttttatagccaggctcttggaaaaggtggtctgtgtttagtctccacttttccccttcttaacccactgcagcctggccgcttcttccactgcctcactaaactgcaccaacaaataggagtgacctccttattaaaaaagccactgggtgcttttcattccttctcatttctgctttttctctggtgtttgatgctattgcagactcctttcttcttgagttctttcttctgtggcttctctggccgttatttctatctctccttggagggcccccttcctcccgctgcctctcaaacattggtatacctgtttgtcctgccctcaaaccttttctttttcactttgcatgctctctctggggttatcactcagctacacttacctagtcctagatctagaactcatatagaatcacaagttcaactttctattggacagcttcttctgcatgtctcacacacatccaaaagttgagaatttcaattacctctgcacactgaagtttgagcagccttcttttagggcctagtacaatgtctgacatcttgctctacctggctagctgcagtcagggaacttctttaagggaaacatatcagaatcaggactcagggtggcacagaggttcctcccgctgtcagtgactgtgttcatgcatacccagtaacaaaggagcattggtttaaaaaatcactgacttctgaaagcgctccagtaagcttgaaatgatttgctttgcttcttacgttgattatcatcagtttgaggtagcaagtagcaggtgcttgttcctttctttggaggtgaaaagccaaggcccagagagagtagacataatatgcccacattcaaaaagtgactccctaaggagtcagggcaaattcatttattcattcactcaacagatatttattgaaaacaattatgtttcaggcactagaaacagagtggtgaatcagacagatacagtttttggcataatgaggtatcctttttgacgatgcttcttatctcttctttgctcctattttttccatcctgattagtgataaatgataataattagcaaatgtttactataagccaggcaatattttaggactttacacatattaactcatttaatcatgatgacagcactatcaagtcattgtcgttactatcccattccacagagggggggaatgttgggcagtaggaactttctaaatgtgtcctacctagctcatactggtagtgataaggcgtgaatttgaacccaaacaatctgactctagaacccatgctgttagcgactgctttagctattctagctcttaacactgtaatacttgcttttgctcatctgtttatgatgctgtgtctgtgaagtatgacagggtagttctcagcatgccaaaattaacctgcagctttacctaacaaacatttggacttactttgctttcttgagatatttccccccttgggcatttcgttggcagtagtctcattttctaatctgaaatcaggagaaaaggaagaaaaacttgcaataaagcttaagtggttgtgacaggttgctaaataaaactggctcaactgaagttttgagattcttgagaaacactgagaatttcttacaaaagaaattttccttattataataggaaatcatgggtcattgcacagttataagtgtcttagtaaagagagaatgtggcttgaggctaagaagcctaaaatcttaatgagattatttgtgggctgctatttatgcataatttttaaactcttagaaaatatgttttctatctgtctttagtatgtcatcttaagtttccactgctttacgtaattttgaaaatctttagggttgctagaaaaaaaaaacaataatagcaaatgtttacataagaatttaagtttagagtgtactttcacatatagtaacttgattgtttctctttttactctcttataaagaaaacagccactccgtctcaaaaaaaaaaaaaaaaaaaaagaaaacagccatgaggatatcaattcgtgttgaaacttttttaaattgccaatgttttcttatgcagtaattgtaaactgatttggaaaaaaaggaaatctaaatctgtgaagcgtttacattactgaatagtatgaaaggaaggttttgttacttaagattgcatataataacttcaggaaactgctttaatggataagtaacaatagcatctggttgttagttgatcatctgtactccaaggcctctgaagtgggttcacaccccccttggtttgccaattttatatcttttatgtacatagtcctacttccctcttttcataattatccaaaggttaccagccaaaacctgtgtggagggtacacggaggatgagatgtgtcccctggggtttttgcattagggaaaattcctgatctgggacatttgtgccctgaccaccagcccccaagagatgccacatttttgtctactttagttgaaaactctcagtcctacagtaggctgtagtaggcctcagtctgaataatcacaaaaccaagaaacattaatgagatttttctgttcagtttctacagtgtccggagcattaacaaaatatatatttgtatgaaatctacaggctactgtgtaaataagcctgctcccttttggttattaaatcatacaggaaagaagcatctgttttagcagaaactgtggaaaaatatatccaggtagcccaggaaaagttgaattgttactgacagatgtgtcaccacagacaagaaaagaatttacaaagcagtggacagacaatattttcagacaataatctgtctttttgggtgatgtgtgggtagcattggtttgtttcttgcctgaatgtttattcatttttttcccaggagaatcccttttgctcagcttctttctggtttggataaaatgaaaagtaaaattgacttaatactaattataacctgcataattctactgaagagaaacttaagaaatagaattattttttctagttaagcttcagggtcatataattattataattcaatcatttattatccccccacccttttttctgtgtgatttaagacatcagaatttaatttgtagccagaatgaaaactggacttaagaaaagcttgactagagagagatttgcattctgctgcgtggttgaacatgtctctaaagtagcagctttagaatgccatgtcctgatagaattccccgttgaaagctagccagcagagcagcttccttgtgtcctcctccttgcctgacccaccgtgaagcgtcacgagggccctagatatgaacctcgggggctccacagcctgacagaagagaactagtgtcgctgggcaatccatgatctggcacagaagccccaggctctagattttgtaattggccacccaccctggcccaaccttggataaatattcctgagttctaagtaggatgaggaatttaaatccctgttttttcctgagttcttccataaccagtccacgacattgttatgagatctgagtggagtgcccatgcttggagagggaataaagggagcacgttctactactactaatgaatacatactcccattaacagtccctttttccctaggaatgatgccactggaagggccagatgtgactccactgtagtcactgacccagaccagctttacccctagggtaattgaaacctatattaaatgatttgacaggtcataagcagtgccctctacccacttaattttctcagatgcctcctccattatgagctaaaccttgtagattttcattcttttagtatatggttttgatcccttctaaaatggacatctcaatgaaacataaattacttaaaagttattagtagtcatttatgccatagtatgaattagtttacgtttctttggttttgacaggaagataaatagaatacgttggggagaaaatgtagaactcgaaacaaagggagaaagcaagttgccacctttggaagactgcagtgatttctttcccattagaatttgctctcatgttttcagtgaagcatggcatcgtgttttccattcacctctcctttctggcagggaaagacttggagttctttttacagctttaactctttcttaccccttctagatgtagttccatttcctttctaagatgaaagcttgtctttgtgccctcccagaatagttccaagcagcagaacacagtgaatccttccagataaaagaccctgctgataaagtgccagattgttatcagagaagcagtgaggggagtcaagtccctaccattaattacctagttacagttttgtttatatcctgttcatttggggcatgtttttcttggacagtttctagtctgtgttctgaactgaagtctgaagtttgtaaaaatcccaaaggtcaaggaatagtgggttccttattttctgaaaggtttaatggcaaggaagagaagatcaaagtttctatctttcatctggaaggaaatagacaaatgcttcattttggtggttcattccccacctcaagcatacaaaccatagtatgttggatgaactctgacttcgaatacctagccaagaggttacctggaaatagaatgacatgtatctctgtgaagacgtgagtatcaaccaatgaatgactagatatccacgcatcaaggccagagtccagttgaatctaaaataaagcttcttggtaaatgtacttgatgccactgaactgtacacttaaaaatggttaaaatggtaaattttaggttatgtgtgttttaccacaacaaaagtaaatattacttcctgacagctccagtgcttcagtcacagttgcaaatacagttggacctcatccaatcatttatggattcaaccaactgtagatcaaaaacatttggagaaaaagtaaacacaacaataaaacacaatgcaaatgtaaaaacaatacaacataacaacttacataacatttacattgtattaaatattataagtattctagagattatttaaggtgtaccagaggatatgcataggttatatgcaaatactgtgcatactttacataagggacgtgagcatctcacgggtcctagaaccaatcctttgaggattctgagggccaactgtacaatatgggtgggctgcatggcctgcattattttgaatgggattgctgttgcatataaagcattatgtatccatttaagaactgtgggactgtgagtaccgaataccttaatgaacagaagaagatgaagagaccattttgtcaccatcatacaaacatactaggaagtttgggattggaaaagagccctttctgtcttgaaaatgattgactctgaaccatgatagccactctctttctacaaatgaaccaaaagaagtggcaatgggtcacttgatggctgaaatagtagtgcctaaggctttgattatcaaatagtgatattgatatgttccacaactagaaatgtagtattaggtaaggcaacctcatctgtggtatctggcagccattaagtagccaagcatatatttcttgaccgtattaaatttgtatctcaccttatgctgctgtattaggttctgtccaaaacccaacccatctttgctaatcagactgctgacttacgattcagccagccctcttagcctcactggtgatggggcgggggtggtggtggggttttaggactagactgttgtgtttttctcatcaagccaagaaacttctcagaccctgcaaacatgttacctggtaacatagctacagtatgaattttaggatagaaagaaggaagggagggaggaaagggaaaataaagaaaatagccctatgacatagctacagtatgaatttttaggatagaaaggagagaagaggggagagagggaaataaagaaaataaccctatttcaaatcatgaagctttttttatcgttaaccccaaatgcccttaactcagaactctgaccaaaagatgtctcttttttccctgtgtgtattgaactcatgcactcatgcctatcatcatttgaaggtagttatgagacattcattatgacttcaataacttgcacatatttaaatttagtgttttctttagaaaaggctagaagatgtagggatttaggaagaagttaaggtaaacttaaaatatataaaagctcactttgagtgaaaacaagtaaaaacaagccctgaccttctcagaggtaagaaaagttgaaattaaatgtattctttaggaaataaagactttgccaagaatagcatggttagttaaagcagtctggtgtggaaggtgtgtcttttaaaaaataagatttctttactttcttcttgactaatggttttgtgcagaagaaccatttgaataataaatgaaatgctttgaagtatataggggagtggagaacttttctgtgacttgtatgaactggtgatacagattataaactaagtgatgccaaattccaccagtttacccaggctctgaacactagcaaatgtagtcaaagccatagaaatctgctgatgaaatcatgaaaatgaacagaagtgatccagattgtttaatttcttttgaaatattatatttattagattttagcacccaaaagttaaacagtattgaatttcacacatagcactttatttttaatcttgggttgaagattatgcacttggcatgactgaagagtgactcatacattttgcaccgactttattattagtagtattattttgataggcaaggaagaaagccggggagtaagatgatactgaattgaggctaaatttgttaattgattgaactcaaacggaaataaagaatgtcacttaattttcttctttttatattcatgtgtgtatcccctgtgaagactttgaatgctactcatgtttaaaatccaacataaaatatcatctgatcatcaaaattggcagtgggaattagcagtattttcttctaattaatgtctcaaactgtgccacagctaaaatctcatcacctggacactttgaaagatgtgaccagtattctttactgacatgtttcccatcttaaaacacaatcaccatgaaattaatataccaagtcttggtcacaatccagggaaagacttgaaggcaatgtgattcttctcataattagcagcctaattaaatgctagagggcttcagctgtatagtaatgtaccgtgcttctgaacaaagataccaccaccattgaaactgtatacttgtaacactagtatatttttaattagtggcagggtatagatgtatgtaatcagttttgtttcatcttctaactttgcacagcagtctccattgtgcattcatttggaatatattgaaaaataatccactgatttggcttctgtttgtcagaatttagggtgactaaaactagtatgagttgaaaattaccttttcatgatggaataagcaaattaaaaggctgttcaaaatattagaaagcaggtttaatctaatcaagttggggggaggggaatcttttaccttaataaccactacgaaatcataccgctgaatacagcaggtgagtttattaaagctggcccaacaaatttgacatcacttggttgaataattggagctgtcaagtgtccttaaaatgaataaaattgaatttcttttaatatgtgctattgttgttcacttctatggtggtaaaaatatcagagatggggaacactcatttttgcaactagcacaggctctgcagtgagacagacttgactttgaatcctagctcatacattcattccctttgtgagcctgggcaagtcagttaacttctctgagcctgtctagaacatgtgaaagattcagaacattgtccaaaaaaatttttttgttttttaattcttgtgtgattgttaggatttaagtgtttattgatttgattttttaaaagagcacaaggaaacattaattctggttgtaaaagtttaaaggaaatagctgggcttgtttaatctgaggaagagaagacttgagatgttttggagatggagctggaggctaagaaagcaagacagaatgtataacaacttttctaatgtatatgaaagattattcttttaaaaacaactttattggggtacaattgacgtaaaataaactgcacatgtttaaagtgtacaatttgatatttttatatacccataaaaccatcatcactgtcatggtaaggaacatagccatcatcctttgtaatccttacccaacctcccctcccccacctccctggcaatgattgttttatgttctgtcaatacagattaatttgcatttcctagaattttaagtaaacggactcatacaggatgcattctattttgtctggctttttcactcagtataattattttgagattcagccatgttgttaggtatatccgtagcttgtttctttttattgccaaatggtattcgattgtatggatatactgcaatttgtttgtgtacttagctgttgaacgacatttatgttgtatccatcaactagtaacaaataacttgctaggaacaatcatgcacgagtctccttttggacttaggctttcatttctctagtgtaaatacacaggaattgaacaggtgagctgcgtggtgagtatatatttaacttgttgagaaactgccaaattgtcttccagagtgattatacattccccactagtagagtatgagaattctaattgttccatatcctagccaacacttggtatgctcagtctttttaactttagcctttctagtgagtatatagtagtatttcactggggttttaatttaaactttactaacgtctaaggatgttgggcatctttacatgtatttggcattcatatatcttctttgctgaagtgtctgtttgaagctttgacccaatttttctgttaggttgtttgctttcttttcttctctctcttattttttttttttttttaagagatgagatcttgatctgacaccctagctggagtgcagtggcacagtcacagctcactgtagcctcaacctcctaggctcaagcaatcctcctacctcagcctcctgagtagctaggactacaagcacatgccaccatgcctggctattttttttattttttgtagagacagggtctcattttgcccaggctggtctcgaactcctggccccaagcaatcctgctgcctcagtctaccaaagtgctgggattacaagtgtaagccatcatgcctgcttttgttttcctattattctgaatatattttggatacaagtcttttagacatagatttatttctttccctggcatgtagaaccagaaaaacaaaattaaattgcagcaagaaaaagtataattatactgtataaggaagtattttttttgactggcagtataaacatgcgtactgggataaccaaaggaggatgtcagactttctcaggggtatttaaaaactgactggcagtagtctatttgggatactgtaggcatgctgaaatatgactcaacttacctaattgcaattttcatttgagaaaagataccttgaatgagtctgttgctaatatctcaatatctgttgctcttttgtgtcatttttccaggccaaaaaaaaaaagcaattttttggaatttttcaaaactttccttgtactttattatttttaaaaattcattctttctggttttagcttgaagtgtttctgtgaaacatgaggagggtcattcaggggcattaattagcttcagcaaaaacaaaatgcagtctctgcaaagtaatcaaattaaaagaaatactcaaatttctttcatacagcagtagcaccaatcattgttttagctgatggcactgggaagattcatttaaccctctgtagatgcaaaataattaatgagattctagagaagaggttctacatgatgaaaggagttggagtggttgtagccctcagaagagtaaagggtgctttcatgatgggattccagtagagttaatgaagggttttcctctgtgtagaaaacactggtcatttgttctccaactccacagaggctcaaactagagaagattggctccaactatagaaagattgagtatggttagtgttagacataaaacttttattattagcatcaatattatgagattaaacaatggaacaagagaggtcataatgatattttaaaataaaaaagatagctatctgcctggaatgtttaaatgtccatgattgaattttgtttttgaaggggactttggagatcatttactctaataagcttttatagatgaggatgtgaaaggacattatgtaacttgctgtggccacattgttagatactcatattttaatttgaggatgtcttaaaagtagccttgcgtaagagactcgaaggaaaccatgtaagtgcttctgcttcacagtaggtttcacttcaccaaaaaagtcacttaaagctgatgactgtgtatttcttctacacccaagaaaattctgccaatgtgctgacatgtatgtgtcttttcttgtcgttagtaatgttgaagatttttattcttgggcagttcaaacttgtctttaaataaatactatactttgctcaggggcaacctaatcttctcagtatcgttccaattttagtatatgtgctgccgaggcaagcacaaaatcaatactatactttgaatgactgtaagtgatttgacctgaggtgatcagtactgagagaggataccaggggacactgccacagcatttgtggaacctgtcgcagtctgctgtggggttcttcataaactgttggttgatggctgcaacttggtggatgacttgcttcaaagtcctggtgactaatttgccttccttaaagataatattgaataaagctttaggctttgttttgtttaacactagttagagcagtaggaaacatatttagactaccaattccttatgtatgagacctgtaaatatgcattccagccattgaaattagtgggataaattgcctacaaaggtttcctcattcattatgacaacaaaaaaaattggcacaggacattttatttggttgtggttacattttatttgggaatccatcattctttttatgttcccatagactatctagagtgaaaacccacatatatttatataatattatatactttattttaaagggtttatctaagtactaaaaatgagagaaaatattttaaagtacctggcatctagcaggcactcagtaaatattcctaccttcacttccttttttccttccttctttttagcgtggatatcagaatcttttataaatgtaacagattattgtcaaaaagggaagttaatagaattggtgtatgttgagcattcccttgactcacaggatgtttagattgtctaagattttaatatcatttcagagataatcacctgaaaaattaaactggtcaaagaaaaatttactcagcacctatgatttgtgcagtcaaccttggactagaattagagtactttgaataccagaataagaatatgtatttaatgtgacaatagagagctatcataggttctagaaaatttgaaagctaaaaaaaagttttttaatgtcaataaaagcattcctttctaaaccttctatctatatatagtagggttatatataatagggtttaaaaaataagatggtaaattctctctattcctttgtgtagtgtnnnnnnnnnnnnnnnnnnnnnnnnnnnnnnnnnnnnnnnnnnnnnnnnnnnnnnnnnnnnnnnnnnnnnnnnnnnnnnnnnnnnnnnnnnnnnnnnnnnnnnnnnnnnnnnnnnnnnnnnnnnnnnnnnnnnnnnnnnnnnnnnnnnnnnnnnnnnnnnnnnnnnnnnnnnnnnnnnnnnnnnnnnnnnnnnnnnnnnnnnnnnnnnnnnnnnnnnnnnnnnnnnnnnnnnnnnnnnnnnnnnnnnnnnnnnnnnnnnnnnnnnnnnnnnnnnnnnnnnnnnnnnnnnnnnnnnnnnnnnnnnnnnnnnnnnnnnnnnnnnnnnnnnnnnnnnnnnnnnnnnnnnnnnnnnnnnnnnnnnnnnnnnnnnnnnnnnnnnnnnnnnnnnnnnnnnnnnnnnnnnnnnnnnnnnnnnnnnnnnnnnnnnnnnnnnnnnnnnnnnnnnnnnnnnnnnnnnnnnnnnnnnnnnnnnnnnnnnnnnnnnnnnnnnnnnnnnnnnnnnnnnnnnnnnnnnnnnnnnnnnnnnnnnnnnnnnnnnnnnnnnnnnnnnnnnnnnnnnnnnnnnnnnnnnnnnnnnnnnnnnnnnnnnnnnnnnnnnnnnnnnnnnnnnnnnnnnnnnnnnnnnnnnnnnnnnnnnnnnnnnnnnnnnnnnnnnnnnnnnnnnnnnnnnnnnnnnnnnnnnnnnnnnnnnnnnnnnnnnnnnnnnnnnnnnnnnnnnnnnnnnnnnnnnnnnnnnnnnnnnnnnnnnnnnnnnnnnnnnnnnnnnnnnnnnnnnnnnnnnnnnnnnnnnnnnnnnnnnnnnnnnnnnnnnnnnnnnnnnnnnnnnnnnnnnnnnnnnnnnnnnnnnnnnnnnnnnnnnnnnnnnnnnnnnnnnnnnnnnnnnnnnnnnnnnnnnnnnnnnnnnnnnnnnnnnnnnnnnnnnnnnnnnnnnnnnnnnnnnnnnnnnnnnnnnnnnnnnnnnnnnnnnnnnnnnnnnnnnnnnnnnnnnnnnnnnnnnnnnnnnnnnnnnnnnnnnnnnnnnnnnnnnnnnnnnnnnnnnnnnnnnnnnnnnnnnnnnnnnnnnnnnnnnnnnnnnnnnnnnnnnnnnnnnnnnnnnnnnnnnnnnnnnnnnnnnnnnnnnnnnnnnnnnnnnnnnnnnnnnnnnnnnnnnnnnnnnnnnnnnnnnnnnnnnnnnnnnnnnnnnnnnnnnnnnnnnnnnnnnnnnnnnnnnnnnnnnnnnnnnnnnnnnnnnnnnnnnnnnnnnnnnnnnnnnnnnnnnnnnnnnnnnnnnnnnnnnnnnnnnnnnnnnnnnnnnnnnnnnnnnnnnnnnnnnnnnnnnnnnnnnnnnnnnnnnnnnnnnnnnnnnnnnnnnnnnnnnnnnnnnnnnnnnnnnnnnnnnnnnnnnnnnnnnnnnnnnnnnnnnnnnnnnnnnnnnnnnnnnnnnnnnnnnnnnnnnnnnnnnnnnnnnnnnnnnnnnnnnnnnnnnnnnnnnnnnnnnnnnnnnnnnnnnnnnnnnnnnnnnnnnnnnnnnnnnnnnnnnnnnnnnnnnnnnntggtttgaattgcaggaaaaggagcaactagttcgggtggtggtggtagatcctttgatgaatggaatattggcataggaagaacaagtagagaatctggcaaccttggccatcactgaactcacctgagaatgtggaaaagggcttcaggaatgccacatttataacaaaaacatatttaatacttacaggtcgtgcagaaatatctgctttttccaactcactggatacaaacttggtgtgtgtgtgtggtttctctcttttatgcatgcacacgtacccacacatatatgttttcctgaaggcaagatttgaaactacgaaccacacagaattaaaaaggaaaaagaaatcttagtataatagcggtagagtcgacagaaaatagacttgggccctggacctggagaataaagccaatgggcttcacataaacaagtgaataggccccagagaaactcaagcctcctctcctttctagctcatttagaggggaaggaggagggtaggcctctgtgagcacttggagcctgtttggtacaggccaggctctgtttcctcagccagttgttgagacaaagaacactagagaaaaacaatttgtaaatgtgtataaaggttttattttcaaattattccacctgcctgtcttctaggcattttattttcatgcattatttcatttaaacttcacaacagccctatgaaatgagcactcttccttttccccatttatagaaggtacaaacctaggtttactgacttatctaaagtcacacactagtaagtgtcagaactcagatgtaaacttaggtctgctggattccagagcatgttcttaagtccctgtcctatgcgctctgtgataaagaactatgaagaccctgtttctgttctcaatgtcatttcagtctagcagacatgatgatgcctgagagctactgtggggaaggtaagtgagatgcactggctgctatgggagagctaaatatgcaattggagtaggcagagggaaggaagtgattgattctgatcacagaaggtacagtaaagtttcacaaaaaaggtagtaccttagcagaggccaggcatggtggctcatgcttataatcccagcactctgggatgccagagtgggaggagcacttcaggccaggtgtatgagaccctgtctctactttaaaaaaaaaaaaaaaaaagaaaagaaaaagaaaattagctaggcctggtggcacccaaccgtaatcccagctattcaggaggctgaggtgggaggatcactggagcccaggaattcaaggctgcagtgagctatgatcaaaccactgaactccagcctgagtgacagagcgagaccctgtctctaaacaaaaatgtaataccttagcatagttcagaagatgaagaggagttcccctcttcattacaagagtacaggagtaaaagtacaagagtaaaaggacattactctagtgagaatgaactgaaatgtgcaaaggcactagttggcttgccaaaacatacatagaaaaaagattttttgaaggtagtataatccagagcttcagcctgctgtgtgtcacccagcctttagagatggcctattaaatagggttgtctcaactttgggttgtcagtagatgaccatttcccaggagctgacagctgtgctgtaggacaaacagaccataatggcatggctggcattcttgagtaactttagtgagaggttttagggggtgtgttgggggtgtggggtcagggtcagacatagcttttttgaactcataccagctctgaagatgcaaaccgcttggttaagtaggggcatctagagcaagtggatggtccttttcatcattgacagaagtttggggcctctgttttgcatatggtatagcctcacctgaaaaataagaatcagggctggaggtgggccaggaaatggggaggaactgggggaatgttaattatgttaatgaggtaggatggaaggggatattggctggatcctgaagccatttggagactttgaagcctctggttcctgtgacatgcagggactcgcccagtgctactgagccttaaagttccctcagttcaaaaatacctccccaacattgcctacaaagtttctttcagccactctggcttgtcagatttaaatgaggtaccacatatagagcctggtctttaataagtgttcaggagatgttagctattatcagcatcatcttcgttgttctgcttcacggtctacaaattagagactgattggttctctaagttgttcatacctcagtgtgattaggttgaatgtttggaaacattcggcttttccaaggctctggggattttgaggcaactgcgttgtaaagtcttagaaagactgaattttgtaggtagacagaccctaattaaaatgcaggctttatgctagttttatgacccaaagtatgctgggacacctcactctgttcatcttaaaataaggttaatgacactgaccttggaatgaagattaatgaaataattaaaatagtgtatcaaaagcacatagccagtcctggcacatactagtgacttaatctcagtttccttccttttgtctgggtgccctgaggggcagtttgggttcacacagggaaaggcacaggcctgggaaaggacttctttcttgccaaacccaagcgctctctgcctctccgccgcctctccccacttaggcagagctgggcatgatcacctagactagtactcccacacacaggagtcacacttacacagcagcagcagcttgtgtttacttctcatggcctgagaatcattggctggttcttctgtcttccacactagactgtaggttgcttgtggcctaggcagtgattttctctccagttctctggtacctgaccaagtgtgtgctgtgctaggtactcagtagatgtccctacggatgtgtgtgggcagagacagttttggtgatgtatagccacttacctttgaaacctttcagaaaaaaagaacagattgtgagagtagatatgagaggagaacacttagaaaaagcttagcccccactctgttaaaggtggtaaagttagcatgatctcagcagaatggtcctttttttgctgagaatagtgcattctgaactcttcttggttcctcaagtgttaagtccaagtgtgtatttcaccctcatttgaagatccttcatctgttgcagaaaattgtctcagctctgcctcccacttcacttttctgtgccactcttcggctgtgaatgtctgcatgggtaccaccgatttgtgatgagcaggctgtatatcgcctctaagctggtggttccctgtgagcagtgttcttcactgctgtgtcacatgcagcagaacacaaacctgacagccacatcgtgtggtcattgatgtatgcaaaggagcagcaggaggttctccacctgggtctgggaaactccccccacaagggttttggatgtgtgtcacgaacctgaaactgtgtgggaaattgtgtgcatatgttcataaatatattcctcttgtgagagagtccatagtttacattagtttctgaaatattttcatgatccttaaaattttttttaaaaaaaaaaacaacaaaaaaccactcatttagaaattttccaaatatgtgtaaattacagtttgtgtttttgttagctaggagatatttttatgctcccttgatttccaggtgtgagctacaggttgggtagccagagagctctggatcacagtctgccgtgagcattgcttacacttagccctcagagttttcactgaatccttctgagcttcattttatttttcttctgttaatttaggtttataatgcccttttgtctacaggaatgttgcatagtaaagagatcacaggtgtgcaggtgttttatcaactgtcaagtgctgtacaattgtgtgatgcaagtattcctattaaaaatgtatcatgtctcagctgggcatggtggctcacgcctataatcccaacactttgggaggctgaggcgagtggatcacgaggtcaggagatcgagaccatcctggctaacacggtgaaaggccgtctctactacaaataaaaaaaattagctgggcgtggtggcaggcgcctgtaatcccagctactcgggaggctgaggcaggagaatggcgtgaacctgagaggcagagcttgcagtgagccgagatcacaccactgcactccagcctgggtgacagagcgagactctgtctcaaaaaaagaaaaagtgtcatgtctcatgtcacacagtattgaggacatggtaggcagtcaataaataagtgattaaaatgaacatggaaagggtttattgaagtgagagggctagaggttttaagacactggtgtctgtgtaccttgcagattctgtggagaacctagtattcaggcctagaacatagcttagggctattagaggaactgattttcaaggaatgttaaaagtagaaatgaccttcgagaccttaagtgtatttgttttattttatggaagacactgagacttagagagacagaggctatccgatttatttcacaagggcttgagactcttcctcatcacttttaatagtggccaaaaaaagaccctctttgccttcatattatcaacatgttgtcttacctttttaaaacagcacagaattcaccacatggtcttaattctctttttggggctactcacaggcctgttaattctggagtatactgatgctattactggacactggcacagtgcactgtaaaaacttggaatttctggagcccttccttcttggagtgttctcttagacatcatgtcagaccactaggtggaaagcattgccaccattcttaactgtactgagactcagagaggttactgtgacttgtccaagtcacagaactcagtgtccaaagcagaatgaaaattcaggtgttctaattttctattctcttaaccgttagattctaaatgttctcatcagaccccctccctgccgcnnnnnnnnnnnnnnnnnnnnnnnnnnnnnnnnnnnnnnnnnnnnnnnnnnnnnnnnnnnnnnnnnnnnnnnnnnnnnnnnnnnnnnnnnnnnnnnnnnnnnnnnnnnnnnnnnnnnnnnnnnnnnnnnnnnnnnnnnnnnnnnnnnnnnnnnnnnnnnnnnnnnnnnnnnnnnnnnnnnnnnnnnnnnnnnnnnnnnnnnnnnnnnnnnnnnnnnnnnnnnnnnnnnnnnnnnnnnnnnnnnnnnnnnnnnnnnnnnnnnnnnnnnnnnnnnnnnnnnnnnnnnnnnnnnnnnnnnnnnnnnnnnnnnnnnnnnnnnnnnnnnnnnnnnnnnnnnnnnnnnnnnnnnnnnnnnnnnnnnnnnnnnnnnnnnnnnnnnnnnnnnnnnnnnnnnnnnnnnnnnnnnnnnnnnnnnnnnnnnnnnnnnnnnnnnnnnnnnnnnnnnnnnnnnnnnnnnnnnnnnnnnnnnnnnnnnnnnnnnnnnnnnnnnnnnnnnnnnnnnnnnnnnnnnnnnnnnnnnnnnnnnnnnnnnnnnnnnnnnnnnnnnnnnnnnnnnnnnnnnnnnnnnnnnnnnnnnnnnnnnnnnnaacaaatgactgccttactaagtgaggtcatttgctaattaaatttcaaaacattttcagagttgttttttgtttttttgtttttttgttttttggtcaaatgaagtttctccccgacccccacccttaccatttcctataggccaaagcaaacatttttctgcatttgccaattacagattaaacatttaatcacttaaaaagaataagtgagaaaatggatgagttttgggaactgtccaggatgagttgtgggaactgtccagctacctactgtaaccatagctctctgctttcccacagataatgtgaggtgacctcttctccatcctgaaactatgtgctgctggacctacccaatagacgtaactgtcttgggggaaaaagacacattttttttaaacaccccatacttctttttcctcttcccctgcctcccccaacaccatgatgaaattctgctcaggctattctatttgtacagaaattgtatctgtatttctgttggcatattagaataaatgttggtgataacctctagggtgttagaaacattgctattgtagggccctgtccctctacttactgagccaacatggccatgtagccctaatggcctaattcttaccaagtaattcctttgtaaacacagattagttttgaaaacagtcaagaggccatctcttttcccctacagagtctaccgtcttctgaccttccctattcttgtgatctaagatatttctgtaagttgagttacctttttaattggatgaaaaatcatgaagtcttgagcgttctagtaaagaacttagttaagctggtacttagcatattggactttcctctcaatcaatctcctatctgtgaaggctttaaagtgcacagtttcagcaaaatggttatggcctttaagtttctgattgtttgtgaagttgagaggcctttagatgacctgcctttacaatgacctttctagaatctcaaaataacttgtccaggactttcactatttaagaactggcttttattcccgctctttgggtatgagtcagcccagagtcaaggatttggtgatttgaaggtccatctcttgttctcttaacagtaagttcagaccatgtactatgctattcgtagcactccccagtatggcctgacccacttctcagccttaacttctactgttattcatgaacctctgcgttattcaaacacatctacctagaccttgagtatttttagccttgctttataccactttgcccctggttgaaatggcttcagatctttcttggcctacttgaatcatgcttgctttcctgagttccatccttcttctgagtttctatagtcataatgtcaaggtcacttgcttctcacttttcctatactgtctcgtacttttggtcattttttcaaatgtacttttcctctggccaaccaaagtatgggctcttcaaagacaatggtgactgtcttattttttatggcacttatcatggtgcttttgcttatcataaatacccaataaatagttaacaagtaagttgttttttgctactacctgtttattgtcttattcccaagcctgtctacatttaatctccatgataaagaattatagatgctagcaatgtttttaaccaaagcaaagtcacctgtagaactagtgcagatacaaaacatcatttgggataaggagcagctcctgtctccccctaacccctggatgttccaggccatgctagatagaatgtaagtatatacaaagtcacagatgtggagatgactattgaatggtcttgtgtttttatttctccccaggtgtggtcactcacctgtctaccactcccgtgaaatggcagctcgtgccttggtcccatttgttatgatagatcacattcctaataccattcgaactctgttgtccacactccccagctgcactgaccagtgtttccggcaaaaccacattcatgggacacttctccaggtaagtaaagttgctttgtgtgacttctgtcaaacaccataagatgaactttggtttcttatgtactgttagctggtgaagatttgatacacagcctcttaactttatctgtagaacttttttttttctacttccgaaagatcaggtatctcctagttatacttttttcatcccaaatatcactacagtgttacattgtgattctcttatattatcttttgcaatacatcctgtgttttctgcagtatactttctcccacttggcctcacctctctgaaccagataaaactttgtcttttccatcaagtatgcctgcaaaacattctgggctactacctattccgagtgaaactgaaagcattccttgagagaggttagcctgagaggcacaggaagagctgtacacatcagggagagtttgccctgtggcacagcaccttagtacgtggaagtattgaacctttcctgttttctctgtgctaccaaaaaaaacttattactttgaataaatgtacaagtttattgtttttaacctaacatttcttctagaaaagaataacatacaaaaaataaatgagaaagagactttttactgaaactgccctatttcaaccctaacttgaggacaggtagtattggtgaggtctcctgttcaaatggctgctatagtgctcatataggcatgcggttaggggtggaaaataaatgtcaggtcatgttcctggtttatgaacagagttgagagatggccttgagatctcaatacatgttataagcctgagatcgacactgctgacatggcaggcagtgtgtggagtgattaacaaggtgaaactctggagccagactgcctgggtgtgaatctcagatctaccccgcattacttatacatccatgtcttcatttttgaaataaggataatagtagcatatacctcatagggactttgtgaaccctaaggaaattaatacatacaacatgcttagaatagtgccgggtacaccacaagatatatagacagtcattattgttattattatcattaattttaataaacctatactataatgaaaactgattatttcataactaattccccctaggtaataagaatgcaagatagaactatctttttcttttttctttcttctttttttttgagacagggtcttacactgtttcccaggcaggagtgcagtggtgcagtctcggctcactgcaaactccgcctcctgcgttcaagccattctcgtgcctcagcctcccgagaagctgggattacaagcagccctgcacccccctgtccccacagtcactaatttttgtatttttagtagagatggggtttcatcatgttggccaagctggtctcgaactcctgacctcaagtgatccgcccacctcagcctcccaaagtgctgggattatggacatgagtcactgtgcctggccgttccttggttgttttctatattcaacaaatgcctactacatttcactgtgtcacagtcgcaatagcagctaagtcagtttttgccttgaaggagccaaggacaaaaaaggaccagaaaataggcagtcatgatgtagtgtgctaagtgctggctgaacacatagcagggccaccagacttgtctaggaaatcggggaaaatgtcccagaggaagtgacctctaagcagagactgaagaagttagccaagtaaagaaagggaaggagtctcccatgcaaagagagcaacataaaggctcccagtgggtagcccccaagtgggaactgctggtttgggtgggactgaagttctaggttggcagttttcaaatttgtctcaggacctctttacactcttaaaaggggttgcggctccccagagagttttgtctatcaatattcagttagaaagtaaacttgagacaggctggtgtgggggctcatgcctataatcccagcactttgggaggctgagctggacagatcacttgaggccaggagttcaagaccagcctggccaacatggcgaaactccatctccactaaaattacataaattaactgtgtgtggtggtgcacgcctgtagtcccagctactcaacttggaaggctgaggcacgagaattgcttgaaccccagaggcagaggttgcagtgagccaagattcatgccactgccctccagcctgggcagcagagtgagactctgtctcaaaaaagaaaaaagtaaacttgagaaaatattaaaacacgaggacttccaagcacatattgcattagttatcaatataatgatatcatcacacaccttgtagcctctggcaaactccactgtacactcatgagagaatgagagtaaaagaggaaactattttcttggcatcacttgaaaataatttgtcttgtggacctcttgaaaagattgcacagccccagactgcagtttcagataatctagtctgtgttacatacattatgggtcttaggtggtttctttaatataaactcttgagcactcatctcccttgagtttccactacatccctgtgattaggagagggacaggggttattgtcttggtcttaaagatggaccattgtggctcaaaaattatcatttgctctgcctcaaaatttacatctcttgattgtgtcagactctgctgcttcttcaaaagagcagggctggaatgatgaggaatatagaacagccttttcaaagtgtgaactgtatctgagttagaaggaaggcctagcttgtcaaggggatcagccatcagattttctttactgaagatccactcttggctgaactttatccaagtagtttggttggagttgcttcttgggctctctcaccagttgtgcaaatgagcctcccagccttgtttcccacacgtgctactggcaggtctggctgggtttcaccagtctgcccagcaacaaaacatggtcttttgctctgtgtctgggctacttttgatagtctcaagtttacttcttctgctagataaaatgtgaaatcctgtggaaaggttaaaaccctagaaccctggggttgttgtggctgttgctcttgttcctaagtgttggtgggatgaagggcttgttgaataaaagccagcaaatgtggttgttgggtatcatattcatgtttgtcagacagattcctacctttatcaaggttggtttaccctggttgagaaaaagaagtcaaagggatgtggaaagtctttctggcatgtccatttgggtgtcacacctgtgttgtcctagttctgtccatcctgtggttctttatggggaaagcataaagggttaagttgggaagggctctttctttttcctttctacagcttatagattcctctccacataaagctacctttgaaatcattaaaaagcctgcacctggaaaagaggtgttagggattgaaaggaatggtcatctccatgggacctccagagccagctaaataaatataaagttgttatttttttcaaaagcaggaaatcatttcataatcagaaaacaaattctttcacagaacattttcttgaattatacattttgactgctttgaaaatgtttacataaatatatcaaatctcagagtatttctatagtataccttgaaaacaagaaatatgctgatctctgaattttctgggactatggaagaaagactcaaattatagcacatgcaaaaaagaacatgtgggattcatttcttaatcgttttaaaaaccagaggttcataattgctgtgttgagatggttataagtaacacacattagaaaaggtgaggttatgcggcagattcatgagagccaggggtaaatgacattaaatctcaataaaggctagataagagccatggacattacctcatttgggaacatcactagcagggctgctctgtcttttaagtagatttaaccttctgtttttgttgccagaactcttcatgttggggacttaacattattactaggttacttatcactctcaagaaatcatattggagttcagaaaatcttatattgaggaggagcttggccaccaatcatgaggaagggtttattctgattcttgggtacttaactcacattttgggtgattcataagaaaatgtataccatttgaaataagagtttgaattttcagttttttcatttcttgtctattttgggtcttttgttgttgttgttgttgttatgtacaaataaaaggtgatctgttgctcttaatttagctcttttttttttttttttaagacggagtctcgctctgtcgcctaggctggaatgcagtggcaccatcttggctcactgcaacctctgccttctgggtttaagcaattctcctgccttagcctcccgagtagcttggattacaggcgcctgccaccacggctggccaatttttgtatttttagtagagactgggtttcaccatgttggccagactggtcttgaactcctgacttcaagtgatccccccaacctcggcctcccaaagtgttgggattacaggcgtgagccaccgcacccggctgagataacatattaaactctaaagcctgtgttcctattttctttagaatgtgctgcctctgatgtgaataacagctttttatggctaaggaaaataaaccaaggatccatctaaagatatactttatcactcagttgctctccttaaatctaattgggtatgttatgatacagtggaaacaaagtaaatctatttgtgttattgagacagaagaagtcagtgaaacccagggaagctgcgacccgtgaaaggtatattgtaccctcccctctctactcatctctctgtcatcatttctctttggtcttccatttaatgctactaaatctgtatctggaaatacagatcctcccttgggacctaggctatagccaagtccatagttgccccaccttctgtcatccttaagggtttgacaaaacctctcaaacttgggtaaccataggagttatggatcctagatctaggaactgataggaccatgagaaggtggtcaagactgaatttaattcagcagacactgtagcttgcttaccctgtcctaggcactggtgaaaacacaaggagtttgcctttgatgcaaacttaaagagagctgtggattagaagccaagtgagccctcggggaccagggatcatatgagtaacagaaatgaagaggagacagaagatacaatgccagacagggcatcaggcataaaaggagactgaaactgaggccatttctgcttgagtctggagcaccccaatagattctgtgtttactgtagagccagaatctttacgtgatgggaacagtagtgttgggctggatgggacacatgaagaccgaaactggagtagactttagcattacctttacgggaagaaaaccagaaaacaaagaaagaagtaaaggtaggctagttcggccagctagttgtatgaaggaatcactgtgcaagaagcagggatggaaccaaccatccttcactctattctacagacaggagcagtggaagcaagtagaaaatcagtgatagaggtaaccttaagtgtcaactctactggagtttcttaaataaggaagcaaatgaacatttatagaaaagatatgtatatatatttctgttaatattactgttacatcaaaacttgtgattaaatataaaagaattatttccatcttttaaaaatgtaaccatatgagtcaatgtcttagtgctttaagaattttaatgtcatttatatttcttaaaactacaaaattgtgaaacataaaacggtccagctgtccagaaatggaacatttcttgatagattccatttggcgacctaagatgttggccgtctccattgttgtttgttttatgcctcgaaaatattatttcagaatggaaaatcaaaaacaaaagcatgaaactatgctgatgctgtaagttataaatggatttctggtctgtgtgctttttttctggaatgagtcataatttaaagaaaatgctcactcttgtcaggtggccagatttattctttctttttgaagacttgtgttagtgtgaaaggagaaaaatcttaagttgctagaaaggtccctagtccaagaagggttaaggcagagtttctccagtggcgtggctatggatgtgccaaggtatttattgattccttcagctctcagggagtcttgagtgtggcctggcagggctggagcctctaggcagtcacctgcagctgggagcagcatcgttggttttatcccagagtgccaaagaaagattactttctatgtgtgccttgatgtgaaaaggattgggaagcattgggctcttaaaaaaaaaactaaagaaaggactaaaccttgttaaatcttaccttttggcaatatattcctttctggatataagcccaaaaaagtcatttttaattaaaatgctacttttgaagatgaattaatcccttccttataaacatccaaaagcttttatttggtgtctgttacttagggagcttttgctgggtgttggagacagcttttagctgccaggttctggagcattgactgtactgcactgtgtggttgttccccaagcaatgtactgctgttttgaagtgctcagaactcagagtatcagtcaggggcaagtgaaacttagagatttgccatttgatgtgtcctcaggtgtttgtaactgttcaggatcagagtaggggaattaatagcaaaaagaggaaaaatatatatttttttcagtgagagatagagtgtgtgtgtatgtgatgtatgtgtgtgagtgtgatgtaccagtcactgagttcctacagagcctcttctggaggataggtgttattcccatcctactggtgagaaaactgaaaacaagaggggttgtgcgatttcactaaagttatgcaagattaaatggtaaaaagcaaaactgagattcaagcccaggatcgtttgaagcttttgagcttgtgcagttagccactgtagtatactgcttctctggatgaggaaaaggaatattgtcaggggagaaggattctatctggggccttcgggttgtgggtaaaatgggatttgatgtcatctatttattcattcgacaactgctaattgaacaccagctacgtgccaggcactgttctgggtgcttggactatatcagagaacagaagagacacatccttgccctccaagattactgctctcagtgtacttatattccagcagcagggagacagtaagaaatgttcaagaaataaacattcaataaaacatatcagaacttattatagtaaatataataggtaaattagatagtttgttagaaggtaatcgttgctgcggacaaaggaacaagtagagtaggctaaggggaatcaggaatagataggagaggagggcagttggcatgtcagaatagtcgtcattggaaacgtttgagcaaaattctatcacaagacatgggaaaactttcttattttttgaataaaggtaaagggtagacatattttcttctgaaactgtgctggctgcagacatttgtaagcaggtataccaactgcatgtttgagactatctttacccataggaaagtgccaacagagtgggcagtagtggataaacaaggccaggaaggatgccattactttagaaacttaagagctccctaaagcgaggtggtcatactatagatgccaggactgctggggactctgaaacccttttcttctggaatcaccgtgaataccgtcagtctgtcatggttctgatgagcttaggcaaagagcaaagtatccatcatattacttcctctgctttctggtatgacctttaccttaaccctctggacctgggccttagagatgtagagtaaatgtggagaatgtttattcttctgcttagcaaatatttattgagaagttaagtacatactatgtcaggtactgtggaggatacaaagaaaatttatagcatattctctgctctcaagaagcttatgagctacctggaaaataaaccattgacactgcagacaattacacagaaatacgtggctacatgttatgtgcaccaagcatgtggccgagatcacacatctgagaggcaagaccaggatggactggagacatgagagaaggcttcaggggaacattgggccttgggataaaccttgaaactagctttctgtttttgaggcaagggacatggtatgagcccaggcatggaggagggcatcagaaagtgtttgcaggaggcagtgagcagaccagcctgttgtgtcaaggagagaggatgtgtgaatggcagggtgggtgcaggtcagcatgtgagagaccacaaatgccgggccaagcagtttgggctctgtaggcctgtagccttcaaagtggggtttgcaagacaataatatatgtggaagaatacgttagtgtgttatttcttttatcgcatcctgttttattattattatggttattgttagagactagggtatcgctatggtgcataggctggccttgagctcctaggctcaagtggtccccctgcctcagcctccagagtagatgggactacaggtgtacctggcttttagctattattttacatttgatatgtaatgtacataatgtattaatagaataatatataatttctaagttaataagtacacaaaagctgggagcatgtgctcagaaaggtcctttcaggtagtaggtaagagtggactctggagccagcttgtctccctctggatcctagctctgctgcttactagctgtgttattttgggtgagttacttaatttctgtgcctccacttcttctgtaaatgggaaaataaaatgacctcatagggtggctgcgaagattaaatgagttaatatgcgggaagtgggtagcaaggtctctggtatatagtaaatgctcagtaaatgttagttgctattattaatacttgctgctactgccaccaccactgctacgggcggggggtgagggggttatgattaaaaatgtaagaatcactggtgtagatggtgagtaaaagaccttgagctaaagaaaaatgtgtttaaaaaaattaatgttgtacattgaaataatactgtaaaacatgaggattcctattgatgtgtgagtgcatgagacaaataagtccattttcagcaattttgactttatgtgttatcatatttcacagagaggttcctccggtcagtcactgtgttctctgccttcctgtagatcatgttaaagattataagagctgagattagctcaaatttttaagggcagagttcttgcctatcaggttgttattccttgcacctgttttgttttgaattacatcctctccctcagatcccactggaaacttgaggaatcagtgtctcacactgtctgagacaaaggactcttttatcatgggaagggagaaatttgaagttcataaagtgaaaggagatacaggatcctcctagatagattaatctagcacattccaagtttttttttcatcttggaagatatgctttccatcccctgcgagccattccactcttactgtctgagacttcatatgactgacgataattctgaatatactttaaaaattatgcaacacaacaaaacatctcaccgtgggtacactgtcaggcttttgtcatttcctagaatccctgtaaaatatctgatggtatgtggtcccataatgtgaagggatttgtttggtggttcccaaccaataaaaatagtattatttgttgttatttgtttttagtatatgcaaatggaataggccaaaagtaagacctttgtttttattgggatagcatatttgagattgcacgtttatgtacttgtgctatagctcttagatatatttatggcacccaacgtatttgagttactaaggacacagctgaccatttaaaagcactgtggttgagtatagccaatttggcagccaccccagatgcctgaagtaaaattgacacacaggcttaaaggaaagtttaaataagtaataaaactcttttcctattttagaccatattgttgttcatgacattcttgcatttctctgtattgctacccacttcaccctttgcttttgtggcagggcttctcagcctcggcactcttgacattctttgttgtgggtgtgtgcgttgtgcaatgtggtgtgtttggtagcacccctccttcatttgtgacaacaacaaccaaaaatgtctctagacatttccctatgtcccctagggaggcagggggcggaggcgggggcaaaattgcccctagttgagaacctttgttccatggtacctatggattttccccatcatcctgtgggacaaggtgtgatacagctcttaaataccagcaaccaccaaagaaaccattcctgacccgggcagaagttgtggctcagcatactacagtgagctgtgcataggcattaatgaaaaggtagggggatacaaaactcagactggagtcactaaggaggcactttccttcctctctttctgtctttctactggaaaagtgttatgaacatataagccagctcacttttaaaatcctagcttcttatagcttgcttcatgtccttgttccaacctgcctctcatccactttcataatgtatagttgaaactgaattctgccctcctcagagtcagagagcataacattctagtttctgtttacctaaggaagcttcggaaaatgacacataattaaaattttctcacttctttacttgaaacactgatgaattgctaggtacagttgctgtctgtttcattgatcctctcttgggtgggggacaagaggctgtgtgaatgaatcttctctaaaaacagaggttctactgaaaacttaacccagaacataaaaatgttttctttgagttaagcataaagctttgtccatattcccagattcagacctcagaaaggaaactcgtggataaatctaacgggtactgaacatacatgacggagatagtaattatgctttttttttttttttttgagaggaaatctcactctgtagcccaggcgagagtgcagtggcatgctctcggctcactgcaacctctgcctcccgggttcaagcaaattctcctgcctcagcctcccgagtagctggaattacaggcacgcgccactggcacctggctaattttttgtatgttttagtagagatggggtttcaccatgttggccaggctggtcttgaacccccaacctcaggtaatctacccgtctcagcctcctaaagtgctaggattacaggcgtgagccactgtgcccagcccgtaattatgttaatattattttttaaaggaccttaaatattatacatgcctcatatatgtaaatgtctagaaagtcagtagtaaatctgtcacttgactctcaaagtagtatgatgcatacaaataagacctttaaaagcatatccttattattgcttttagaaattgtcaaataattcttatacatgtttttctttgtctatttggggaaaaaaaggaaaactacatctattatattaaaatgaaggctctctgttttggacaaaggcatatgtttgaaaaaaaaaacataagttaaatcttacttgaatttctcttgttactgtcaatagcatgcatattttgtgccttttctacatcaagtgaatgggattattaattgaggtatgaatttgtacttgcaaatgttcacctttttggccaattgttgccttcctgcttcatcctccactttttttttccttattaattagtgggttgtgtgttatagtcttgaactggtaccactctgaagcagttgttgaggtatgtatgggcatcagatatcagatgttttactgatgggcccatgttcatatggaataggtatttagaatcttggtcattttcctatttgggatgcctttttaatctttataaagtaaaatttctggtgagggggacatttttcattagcttcctgagaatcatatttctaaaaaggtctaagattatttgtttggagttttttttttttaatatcaaatggatttaagaggttttttaaaagttgtgatttcgaagagtttacaagtgccagcaaattctatcacctttgttaatcttcaaagagatcagtataattaacatcttacatgtgctgtttgacacttttttcttattaacttcttaagcctttaaaaaaatctttagacagatgagttttacatgtaaattttagtccatttatagcagatagactttatgcttgccccttcttctttttttttttttttttttttttgagacggagtctcgctctgttgcccaggctggagtgcagtggcttgatctccgctcacggcaagctccgccttccgggttcacgccattctcctgcctcagacttccgagtaactgggactgcaggcatccgccaccacacccggctaatttttttgtatttttagtagagacggggtttcaccatgttagccaggatggtctcgatctcctgacctcgtgatccgcctgcctcggcctcccaaagtgctgggattacaggcatgagccaccgcacccagcttgccctttcttcttagattacaggatgtatagtcatttttatatctaacttgtttctgaaatgcagtttcagtttcctgctttataactgattttttcaaatatgtgagacatttacttgtccaattaccaaattgttttttgtttttttgtgggtttttttgtttttgttttttgtgttttttgagacagagtctcactttgtcgcccgggctagagagcagtagtgagatgttggctcactgcaaactctgcctcccaggttcaagcgattctcctgcctcaacctcccaaatagcagggactacaggcgtgcaccaccacacctggctaatttttgtatttttagtagagatggtgtttcaccatgttagcccggcttatctagaactcctgacctcaggtgatctgcatgtcttcggcctcccaaagtgctggaattacaggcgtgagccactgcacctggcctccaaattgttttttaagtttgtttatttagttatttattttaatttaattttttgtagagatagagtcacactatgttgcctaggctggtcttgaactcttgggctgaagcaattctcccgcctcagcctcccaaagtgctgggattacaggcatgttccactgcatccagccccaaatttttcttatactgaaaagaagtatgcattgatcagattgagagaaaattgaaatagtcatcaggtctgatttttagatgtgcatatagagaacagagatacaaggcagtaatttattaaaattcatgattgagcgtacaaatatgtgtgttcagtatgtacatttaggaagaacatgctagaaatttgagttgatgttcttcaaaggaaactcttagagtaaattagaaatgtaattacaatccacacccaccaactcaaaagggtactgagttgggtaggtttctgaagaaaatgaataccagtgtaccctagcctgtaatccccaagcagtggtaagctcttactcacacccctcgcccctccccaagagctcaacagcctcattagagaaggaggactatattgttcagtaaatgtgtcttgaagatcatcacttcttctattctggaaaaatgtgtgatttactttgttactctccccttgtcctagcttttcctcctttgttgtttctctaaatttttacttctccctcccgaatgagagcatgagtagaggtgcataattttcagttgtctgtccatttcagaagttaactcttactatcactgcactgatcatagtaagtttggtcattttaaaattcatatagagaagctggggtaggggggtagcctgtgtgtgtatgttagaccaggagtgatggtagaagcctaaaaacatctaaaatttcagttaataaaagaaacaaaataccaccaaaaagtctgcccaagaatttatgttcaagtgaatatgttttggtatttttgtataaatttaagaattgacaacgtttttcactttttttaatgattgacctttcacagatgcaataggttgctgtggagtgttagtaagcactcatttcctgaggtcaggcacagtttagagaaccttgtcactcaaagtgtggttctggaccacagaatcagcattgcttagaactggttagaaatgcagaatcttgggccacctcaaccctcttgaattagaatctgcattttcacaagatccccagttaaactcctatgttcattatgtttaagtactaattcagatgaacgtttttcaggatgctgtactggggctcccagctagtagctagatggttggaccagctgaacctaacattcggtgattggttatgcctttgtttccatgaccaacagggagatgggtgtgatgctaattatctggtatgttagcttaaactgctgatgagaacccttaatactgtaactcatatatagctttgtgttctagctgtcacgtaattctttattttaccaagaagatggtgaactcatggacggcagggattgtgccttacttatgcactgtctccaaaacacctattactaagcatatagtgagcctaggttgattggtttgattcgcttttccaacaaccaattttgatactgtcaatcatctctgtgtggttagatgcatcttttattaatattatttcttctttttcaaaatgtacatttagagccatacatgctcatttaatgccattttagtcccatcccataagtgttcatacatggtgctttctttgttgtccacttttaaatatctgaacattttcataatttattctttaacccattgattattttttgaaattaaaacattgatattgagattttattgttaaattttcttaaaatgttattttgtggtcagagaacataatttataattatattccttctttgagaattttttgaggccatttttgtggtatagtaatgtggtagtttgtaaattgtgtgcttggaagactgtgttgtgttacttaaatcttctaaactcttaactgatttttaaaacctgcttaatctgtcactttataagcagtgtgtcaaaagctcctatatgtgaatttgtcttatttcttctttaattctatacattttagtgcagcagttagaagcagtatccatgaagtggctagaatctttatgattgttatgcttttcaggagaattgttccttttatcgttaagtattttcctcttttataactgttaatgccttttggcttaaattctaattttgtctggtattgacatggtgacaccaactctcttttgcttggtatttcttgaatatcttttttatcttttatgttcattctttgtctctccaagttttagttgtctctcataaagaacatatatctgattttgtttcagtatgcaatctgatagtcactgtctcattttaaataaacttcttacttaagaatagttttatatatactgaaaagttactaagatagtacagaaagtttctgtacacccctcacctagtttctcctattgttactatcttacgttagtatgcaacatttgtcatggctaaggaagaaattggtacattactgttaacgccacacgttttattcagatttcacaagttttcacctactgtcttttttctgttccaggatcccatccaggttaccacattacatttagatgtcgtatctccttagactcttctggtctgtgacagtttctcctgctttttttcatgtttttgatggtgttaacagttttgagaactactggtcagatattttgtagaaagttcctcaatttgggcttatctgtttgttcttttttaatggttggactaggattatgggtttttgggagaaagaccactgaggtgatttgccattctcatcatgtcgtatccagggtacatgctatcacatgctatcaatatgacttatcactggctgggcacagtggctcatgtcataatcccagcactttgggaggccgaggcaggcagatcacttgaggtcaggagtttgagaccagcatggccaacggggccatggtgaaaccccgtctccactaaaaatgcaaaaattagctgggcgtggtggcacacacctgtaatctcagccactcaggaggctgacagaagaatcgcttgaatccaggaggtggaggttccagtgagccaagatgatgccactgcaatccagcctgggggacagagtgagactccgtcggaaaaaaaaaaaaaaagacttatcactgttgatgttaacattaatcacatggcttagaagtcgtgtttgccaggtttctccactatagagcttctctcctcttctgtcttttttccatactctactctttggaatcaaatcactaagtgtagcccacactcaggggcttgggagaaggaagttgagcttcacctcctgaggctgggtggggggagtattgacattacttattttgaattcttctgtgtgggaaatttgtctcttctctcccatttatttatttgttcaatcatttatttcaatcagtatggactcacagatatttattttgtacttcgggttataatccagtattacattatttattttgttgctccagttgtttcagcttcagttttagctattgggagctctttcaggttggctcctgggtgcctttgacatgccttcatcctttcagtttgtttgtttttcttccttttttttttttttttttttttttgacaaagtctcgctctgtctcgcccgggctggagtgtagtggcacgatcttggctcactgcagcctctgcctcccaggttcaagtgattcttctgtcttagcctcctgagtagctgggactataggcatgtgccaccatacccagctaattttgtatttttcgtagagacggggtttcagcatgttggccaggctggtctcgaactcctaacctcaggtgatccacccacctcagcctcccaaagtgctgggattacaggcgtgagccaccgcatccagccatttttcttcctttctggaacaagatgttctagtctcaccttggatgttcccttttctaggtnnnnnnnnnnnnnnnnnnnnnnnnnnnnnnnnnnnnnnnnnnnnnnnnnnnnnnnnnnnnnnnnnnnnnnnnnnnnnnnnnnnnnnnnnnnnnnnnnnnnnnnnnnnnnnnnnnnnnnnnnnnnnncacacatgtctatttctgtttctgtccttctgcaactgtatttaagctaaacaagagttcatactgacgtctttgactctactccagtattatgtggttcattttagctttctcccttgcatatctgtaaactttgtccaacagtgagaaacctagctcctgtcatctactactcatttatttatttcctcaatcccagtatagttgcacagatgtttcagaatttttaacccatactagtgggagaaaaaaaccttacctactagaatactgtatatacatttcttttgtctttagtcttacggtttctagtcagaacatcattttccaaagttatctgtagagtacagttagattctttcaccacagttgggttcttttgtcctgatctcctggttgattttttaaacatttgcgtacattaaactttagtctttgcactataaagttctgtgcattttgactagtatgtagaatccagtacccaccactataatatcatatagattagttccacaccctaaaaactttcctgtggttcccctaagcattcctatctccacaaaactctggcaaccactgatttttccatccagtggttttgccctttctagaatgtcatgtgactgaaatcacaaaatatgtgtaactttttcattctggcttctttcagttagcaaaatacatttaatattcatccatattgaagccacagcttctttttattgctgaatactgtttcattttatggatataccaagtttgtttaccctgttcacctgttgaaggacatcttgattgtttccactttggggcagttatgaacaaaggtactatacatatttgtaagttggtttttatgtgaacataagtttttaaagcagttgggtaagtacctagcggattgctgggtcatgtggtaagtctgtgtttaactttttaagaaactggctatcttccaaaatggctttaccattttgcattcccaccagcagtgaatgagagttcctgttgctctcagtccttgtcagcacttggagtcaccagcttgttgggttttagctgttctagtaagtgtgtagtattacagtagctcattgtggtttttatagttcttgtcttttagtaggctatcttaatccatttacattaattatgattcctgatgtcattgaacttttttggttctattatttcacattttctatttatcacatttctctttgcttcttgttttctttccttttacaattgtattaaatagttgtgtgtttttttaactcgctcttcatttttaccttattctgttggaagttatagactccatctctatctttttaagaggttgtccataaaatcttaaagatattatccttattttctcctctccagaagatacggacattagaatactgtaactgagtttgcttttcctgtcttccacattattattgtctactggacctaccttagttttaatccgtcattatttttattattttacactcagtatttatgcttgctaacatatttaaccaatttctctgttcattattttttcttgcatcccactcctttcttctgattttgatttctgtcttactcaatttctgtcttatcctccagttgaggttgtccaggttgacacttacttccttcagcactttgaagatattattaggctggtgcgatggctcacgtctgcaatcccagcactttgggaggccagggcaggtggatcacctgaggtcaggagtttgagaccagcctggccaacatagagaaaccccgtctctaataaaaatacaaaaattagccaggcatggtgttgggtgcctgtaatcccagctattcaggaggctgaggcaggaaaatcgcttgaaccctggaagtggaggttgcagtgagcccagatcatgccactgcactccagcctgggcaacaaagcaagactccatctcaaaaagaaaaaagaagatactattatattgtctatgacatctgttattataataagacagctatcatcagtttgattgtcattcctttgtagattatctagtttttgtggcatttaagatttttctgttattgatggcttacagttttattatgatgttcctaggtgatcattagttatattaactatactcaagacttggtgaagtcctttaatatgaactaatatctttattaaattccagaatattctttatctccgtttctttgaatattgccatttcacagttctgtccaatttttatctctgggcttgattcttgattatttcctcagatgtattttctagttcactgattccattttcagttgcttatgtctagtgacacaggtgaaataagtacttcattctgtcatggaattttctacttcaatgaaggtgtctcttccccatcccaccctgagatctgcctcttattttctcatggtaattatgtttacttctgtcttttagtcttttcattatctctttgattgttttctattaattttttcttaaatgcccaacatcacctctgcaatattttctccaaaatctatgacctcagtctaatcatgtgaaaatactatacaaacccaaattgagggacattctacaaggtatctgtttaccttagtctttttcaagttactggttttctgtagttcctggaatgtgaattctgccttttgcggtgtctggtgcctttcccaagggttgtaattcttttttagctcatcttcaggaacagtttttcctggcagtcccctgtgcactggatggtagaggcagttgtctctggtagttttgtgtttaaccttttagggccctttctatagatttcataggtcaagacccagcattatgtaaatttcttgttcctatactgcataagcctctctcaaacctgaaattttgattgctcataaggaacaaatttttcacctctggccgcaaggtaactagattctttgccatatccccgatcagatgatggagctttctagtgagtagaacagtttttcatcgctgtaagctttgcacagtgctctcagctcagcatctaattcccctgtgggtcactgcacctcatctatcaccctggctctaagttccttctttatatctggcatttggagattccctttcttgccattgagcttggtatatttaacacattttttccttaaaaaaaaaatctatgtctaaagaggagggggaaacatcatatgtcacctcagtcaagcattgactgaattttcaaatcccttgttgtgaattagttatcaggttgatcccccttccaggcctgtggtaatggcacatataagagcatattaattattcaagtaggaaaggaccgttatctaaactctaaacaattctaaacaatttataattttgccaaaggcatttgcagactcctccacaggtagctcagaggagatgctattgtttatcccaactccccacagccgccttctctttccacgatattgtgccactcccggggctatgttctgcccaagaataggtcgtgttgagtcatagaattttaaacctgtgggtggcctgtgagccgtgtactccatgaatgggaaaacagacctgaggaggtgacctgaattttttgaggctgaggaccgtgccttactcaccacttaaaactcccagtgtctgacactggctccagcacatagtaggggctcttgaaatgttggctgcatatgaagtcacacagtcatttaggagccagaccccatgaatcttaattccctggacaaactcattctaggccaccctactttctagtcatctcacataaagaaacagattttgtttgcctcagagtagtgatgggtagagataagtgtgttgtaatgtatctaggttgccagagcctctgcgaagcccttctgaatgtcagtcattactgacatttgacttaattcgagtgtggtatttggggctcagaaacctagtaagagtctttgctgttgattccaagcaggtgttaagtgttttgcttctaagtgagacagaaataggcttcattcatttaacatgtggccttcagtaactgagacggaatgtttagaatacagatctttatcgttgtctgagggcatcctagtaaatctctaacatcacatgtagtttgggaaagggacattgcttctgtgtattttcagctatagaattaaagaaagttttgaaaatgacttaagccaaatggagaccattttttgaagagcagatggttctctgttttaaaaatgttggctcaattgtcttaggtgtttgtagaaaacaaataatcataaagagggtattacttcaggagtgcatacagcagagtgtccttgtgtcttgactgtctgaatgtagtaagacaggggaagccatgtacattctgaactgtatctttatatacacctaataaaatagaagagagcattactggttatgtgtagaatccttggagaggccagagaggagggatgttctgttttctacaggtacaactttaaccatgctgtaaatattggctctgagggtttcacaatgtttatctggcttcaggggccccttttagtctgaaacagcttgcaggtgggtggtgtttcttgtgttgggttgtgaacactgacactgatttcacgaaattctcttgcaaaatgcttttgcatgtttgtgctttgttttattccttttcttggagaccttcatagtgcaggccctgggctgattttcctttgctgtcttaacactgtcagcagttctgtaacaagattaaagggatacctcagttttcaaaaatagaagttcaggaggtttactgcccagcagaggaaagtcagaataaccagcgttatattcttttggcctacagatttttcagtttcctaaaattgtgaccttgtatttagaaaaagaaaacatttacaaaattttcctctgtgtaaaattattttgaagtgcatgctagcttcactttaacgctactcttttggaaagaattttgtgtaaggtgcattcatcttagatgtcatccagtaattgaaaagctaagaagctacaatgatgaagtataaatcagacagggaccccaagtatacttatcattttaaaattaagaagaatagagagaaaatactgtgttatattatacttacttcattcctacttggtatacagtttgtgatcttgcagtgtttattgctccattgatagtttcattgacaaactggattatgtggtggctagaggatgatataatagaaagaagttttggatccaggcagacagtcctggacttgatattctctttccccattttctagatacttgctagggcaagtcacttaaactctgaactgaagcttacccatctgcaaaataataacgcataattggcaacgatgctgtaaggaatagagatgttacatgtacaaattcccagtatagtggctggcatgatatagtttcttaataaatggtaactatcatttgcatagtttttctggttttttttttctttttggtccacgaccatttattagaaaataaatcttacctccccagactgaaagctgtctttgtcatacactgagtttcagtatatagttgctcttattttccagatttttggtcttttcctttgaacaatttgtttattcatacaccagttgctcatagtagctttacaatatgtgttttacaatttggtgtagactaattccccttcagtattattttttcaatattttatgaactttaaatcaatttgtatagtcgcctaccttttattgtcatttttaaaattaggatcacactaaactaatatgttaacttattaactatatataacatatttaattatgtgttatttagtggtttatgccattccatttgtttgtatccttatatgtcatcaacagcattacattttaaaggttccttcgtatagaatgcattttaaaaatatttcttattgctgttatcagtgggtacttttattggttatatcttttgatagtgctattttacttttgaaaatgattgacttctgtatatttgctttgtaataatactattagtcctcacttctattgcactaactctgggtcaaacacttagatgcacttacatatatttgctgattgaatcctcataacggttctagaaagtgaatactattttacagtgaagaaactgaggctcatatagctagaaagtggcagatccagagttcagaacctgtattcctaacttcagtaccatactgtaccgtgtcacctaactctcatttgctgtattatttgtaaagatcttttgtgcactaatatgttttccgttgattctcttgggctttccccaagaatattacatgtttttgattgggctgaatattataaagatgtcagttttctccaaacataggcttaatgcatgtccaataaaaattttaactttttaaactttcacttgatagtgtaattccaaaattccaaaattgatgtgcaacaataaatagtaaggatcaatgaaatgttttttgattgagattgtgttgcatctgtcaagcaatttggggaaaactgacattgttaaagtataatttcataaaggtaaaatcactctcaggcaaatataaaatgaacatgcatgtaagattttatttaactcattaattaataagggaactagaaagatgttgtgatcaatacaaagaacatctgttggtaatattagaaatgagttttcctggtgtattccaatagagagtttaaatacttattagacttgggcaggctcattggctcatgcctgtaatcctagcactttgggaggccgaggtggacagatcacatgaggccaaggagttcgagaccagcctggccaacatggtgaaaccccatctctactaaaaatacaaaaattagccaggcctgatggtgtgcacctgtaatcccagctacttgggaggctgaggtaggagaatcgcttgaacccgggaggtggaggttgcagtgagccaaaatcgtgccactgtactccaagcctgggagacagagtgagaccctgtctcaaaaaaaaaaaagttaacaactgagatttattacaagctattaatttttttccttaagagaacctagtcatgtactaacacaaattattttagacagaaaatagaaattattggatgccaataataacttgcatcaagagaataagcagttctagtagtcttttaaagttgacagttttcatagagatagtgaaaatgttgggctttttgttttaattcttgaacatcatttatgatttaaactgtgtgttatatattgtattttaaataaacatgtaaacttgtcattattttgtacactcccctaacatttaaccttaaacacccaatacatgtttgttaaatgaatgaataagagtaatgctgtttttgagtaattcaaagggtgtgatggtgatagtattttcttttctttttttcctctttgttttcctattggtagcattagaaataagttttttgggggggtattccaatggagagtttaaatacttactagacttggctgggcgtggtggctcatgcctgtaatccctgcactttgggcagatcacttgaggccaggagtccaagaacagcctggctaacatagtgaaacctcgtctctactaaagatacaaaaaattagcgaaggtgtggtggcgcacacctgtaaccccagctactgcggagattgagaccgcgccactgcactgtagcctaagtgacagagtgagaatctgtctcaaaaaataaataaatacttattagactaatgctctacacttgtcacaatggaagtcgagccactttgaaatgcagtttatatggcctgtttcctttttggtgacatgaaacaggcatgctgcatagcagaacaagaaaactcatgttgtagaaaccccctctgttggctgtgttgagtgggtggggatttgaggaccttcacactctgcaatgcaaagttcccagaggggttagaaactcctgaccctagaactcccaagtttaatggccacttcacctgtcacttcatcattaaaaaagagtgagatttttctagaataaagaagaaatctcattaatttgaatttcactattttagggttttgttttatttgtgtaattctgacacatgtactacaaaaatgtaccttcctccgtgatgtttattattaatgtgtcctctgaatgtatcaggttcagaacagaaacagtacttgtgtgttttagttcacattactcatcatatttaagtaataaaactagcagctctttaaaacttattttttgtttgaatagatttctcgtgtgttcagattagtcttttcccagttagtttgttgtatgcacgttcttagacatttgccactgatgtttaaaaattgtttagctgaccacatagtctttggagactactaagaaagaagtttatattgtgaggaggtgacaacaggcagcccaaagatgggagaatatgtttggatgaatgatgacaaaaactcaacgcccaggaacgagttatcccaaccatcagaaatccagcatgaggtgaatatcctggggcctgggttttataatccatcactgacttggggagtagatatttaaacagtggggaaagttagcacataaacctagctgctaaaatggcaagtgatttttttttttagtgcaccagaaaagggaaatagcggaccctctaagcaattaagtggccaaattgcgtgtggaggtttggcaaacagaccaaagtaattcagtccatggacagcaaaatagttttagttgaagaaactgtgaaggtttaatttattttgtttgccaaggagttgatgcattcaggggtgagttaacaaaagaatcaaagagtttgaaaatcaagtcagtgatctctcccctttgtgaaaaagaaaagaatgcatgttttgttttttttctttgtctttatttttataagagcactttcttactgaatattgtttaacataaagagacaatttacttgtgaaagttcattcccctctcaacaaaaactgagcattgctctttcttatattatgaaaaatcagtatctactattaacattctaatcagtgtagaaattctaccatttaaccaccattgcaaaagaatgttataatatgtcattagacatatgtaaaaactcatcaagctatacatttcagatttggaacttcaagttgtattgctacttttaaaaaatttttgcattaggagtggtggtcagagtttaagaattatatttgataatttaaggaattatatacttcatagtactatgaagaggatattctttatctaaaaaggttccccaaggactgaagcttatggttaattaaaaatagaataaatataaaaatctaccttcaagttactatgttaattatttggcacaactcaaactccagaggctgaaaaagaaaatgttgtgggcatgtttttcagtgttcacttcaaagcagaaatgtaatattcattaatcttgttctttgattgtgatgttagctcttttgttactgtggagtttaccttggcctgagtgctggcaattaaatagcacagtgaagattactggaaaacattaacttgttattgttagttgacatcttgctgaggttgatgggaagtagagtttataaatagccttgcccctgtgcattgattttgaaatctactgagtttcagggatgaatctcattattcagaccattcattacttacatttgaagctttttatttcacagagagtagtttcatcctttagaaaaatgtaatattgaacatagctgtgatacacccttgttgaaacttttgtgttcagtattaacttcttgagtaaattagcttcctatcatttgcttaactttatttttttggatattatataagtgatgatcttccactgttttagaaaggggcctatattccattctgttttatataatttatattttaatctagaatgatctttatgtttcaaatgttttcaaataagcatccttgaacatttgcagtgttcaacatgaaacttctgtttgtttgtgagaacggtgttgctgtatgtcctttcccgaaagcggcctgccacttgaatttttatggtgcactatcagatgcaaatcattaactctgagatctctccagcatgatggtggaaagaacacagggtcaaagcagtaatccatgagggatgaaaggaagttgactctattatgagaaatctaggcagtcaaagtataacaaaagtttctagaaatctggccaaatcgccaaataattgctttgctctttcaggccaagaggcaaaccctaagtttgcattctcattctcctcattaactgatggtgtgggaaggattcagtgctattcaggtaggctttaagacgtggagtttttttgaactgagtggtggctttactgattaatcagtaaggttttcattgagtttcaattaaatgctcagtactgtgctaattaagcactgaatggatgtaaagcagtataaattcttcactgggatcttacagcatggttggggagacacaaccaacaaacctgaagtagaaacattggagtacaagaatcacatagtgttaattttaagtccaaattaattttcagtccatactcacagcatggctggaggatgtagaaatttcatgactaaattctaaagagttaagtcatttggctatatgtcttcagatctctggttgttaggacactgacaaaaacaggaagattttataggctgtcagtgtttcccagctttacctgacatgagagtaacttggggcactgatgaggatatggattcccaagtgcctgtcctggagattttggtcatgaaggcctgaggtaggacctcagaatctgccttcttaatgagcaacctaactgattcttgtgatcagacaaacttgaaaaatactggtttaagtgtggaagagagggacgtaatgtacaaaacctagttaatataagagataagttattgtttttagatctaaaggataagaaggtgtatcccccaagtgatagatattatatgtcacaaagtaatctgcttttgagattaaaggaccatgaagagcactaagaaaaccctgaaatttctaagctcaaatatttaatggacaaaaggtgttctggatttcattttatcacttgttccactctaggaagggtgatcctggtcattcatgtggagaagtgggcaggaagacatgagtaaggaggacacatttgaaatagctcatggtattagcttggcagacacaacgggagactcttccaagactgctcaaaggcaggactgaaggaagcaggagactgagcaatttagtaacaatgtttggtggtcaagatcaaggggcatgaagtaagagttgtgggaaacgagggcagagataacaataataattttagttgcacgtgatacatcttatgaagatcaagtaggtcagcagtatgtgtaaactcttgggcctcatgacatcctcatcctaaaagataggggcagggtggtggtactacttcagttttacagcttgaaagctagtgttaggagaggtgtcattgctatagacagtgaactagagaaaaaagtcagagaatttgagccagtaggttttctaacttgtgatgttaggttggatagatgttgggggactggagaagagaaaaaactatgtttgagttgaggtggtgagtctaattgttaaattttaagtgggtttcagtataggtaaattaaaaggaagttatcaacagatttaaaaagtgctgtgggccgagcacagtgactcatgcctttaaccccagcagcactttgggagcctgagacaagaggatcacttgaggccaggagttccagaccaacctgggaaacatagtgagaccctgtctccacaaaaaaaaaaaatagccggacatggtggctggcacacacctgcagttccagctactggggaggctgaggtgggaggatcacttgagtccaggagatcaaggctgcagtgagctatgatcacaccactgcactccagcccgggcgacagagcaagaccctctttcaaaacaaagtggtatggagtggagatgatgaagataaggggctaacgatgttgagagggcttttagctttgagcaaagagaaactagatttgtatggcaagtaaagttgatggttcagcacaagtatatgatataaaatgaacttttgtacctccttaagatgactgatagatgacacactgataattattatccacatcttaaccatatcttttctggtaagcctactttttaaagtagtctgcaatggagaaaggtgtttttgtttgtttgtttctttgtttgtttgtttttgtgagatagagttttgctctttttgcccaggctggagtgcaatggcgtgatctcggctcactgcaacctctgcgtcccgggttcaagtgattctcctgcctcagcctcccaagtagctgggattacaggtgcttgccaccacgcctggctaattttttgtatttttagtagagacagggtttcaccatattggccaggatggtctcgatctcttgacctcgtgatccacccaccttggcctcccgaagtgctgggattacaggcgtgagccaccgctcctggccagaaagtgtttttaaaaattaaactttgcctaggattttggtctgtgggcttttttctctccaacataacagtagagagactggaaaagcagtgaactttagaaaagtggtaaagtaggtctttaccatcccattgttgcagcgtcactcaataattgttcctttccccacagttactacaatcttgtaccttgcctctaatgacagaccttggtatttcaaatcagcacctgttgctagatttttgttttttgttttgataaaggattaaaagaagtcaaagtggatttctcagaacatttaattaatgcaggctcacaataccagttggtaatgttaggtaaacgtgtagttcacccacaaggctttttaatagatgaagaatcctgtagtcagaaaattcaaaacatgacccaaaaatattactgaatacagtctacaatattgaataatactgacttgagtgtagggaattttttaattaaaattttttaaaaaaagacacataacataaaatttactatcttaaccatttttaagtgcacagtttagtaatgttgtgtggtcacattgttgtgcagccagtctccagaacattttcatcttgcagaactgaaactctatacccattaaacaacagcgccctatttctcctttctctcagcccctagcaactaccattctattttcttgtgtctgtgagtttgactactttggtacctcatataagggaaatcatacagtatttatcttttttgtgactagcttcactttgtattatgtctcaaggttcatctgtgttttggcatgtgtcagaattttctttttaatgctgaataatattcctttgcatgatataccatattttgtttattcttctgtcagtgaacttttgatttacttccgcctttggctattgtgaataatgctgctgtacattatttgctgtacattgaacatggctgtacaatctgctgtacatgatcaatgctgtacattgaacatggctgtacaaatatctctttgagaccctactttcaattctttgggatatatccctagatgtagtattgcaaggttacttggtaatcaatttttaatgttttgaggagctaccatactgttttccataaaaatgtagggaatcttgattttttgttttacttagatggtaacttcattgggaaccttgctgatttgcttgttggcctaggtttcctccactattaagaaatgttgtatgtaaacttttgctttcctatttatattcctccactgtgttttggctacctcctcctctcttccccaccttcatatctcgatccttttgaagcagttaaatattctgcttttttcactgaattgtttttaagatctgagaaattggagattggagatcaaggtgatcatagatcactctgacctctttatctgtgacctcttcctgtgaaaactccacattcttcagacagtgagctttttcttcttcactccaccttacttaggtctttaattgactgaatccctatgcatctgtgtacagttcattagacagtaatttttattggtcggtattttactttttaagtgaaattaatttcatttcattgcatagaacccatttaacttgctaaatatgtatgtgccaagttaagaaataaaagagagagaaactattagcaattcaaatgttgcctttttctcaataagcacctgccctgcagtgaacagtgaaatggtgtcccactgtttagtggtgacacaaagatactgtctctttagtatctctatgctcaacataattcaagggtcattttttactgtacacaatattcacgttagtcacttgctttagaccctgctcccacatattatatgttattgcctcaaataaatcataaacttctaggaagttgagattatctcccttgcacccctcattagattgggagacagtgtcttcccatctgagcaattataaactcttaattttaccccctggcctatccacagtcctggcctttccatcttcagcaaatgagactaccattcacccagtttctcaagaggaacctggggatcaaggaacccaccttttttttaacttgccttctaatctactggtatcatctacttctgtacccttattctctacactgctatccttgtgcaagccagcctcatcttttgcttggacaactgcatttgcctcatatctgacctgtctgcattttgtgcgtgtgtgtgtgtgtgtgtgtgtgtgtgtgtgtcagagtcttgctctgtcacctgggctggagtgcggtggcgtgatctcagctcgctgcagcctccacctcccaggtttgagtaattctcctgcctcagcctccctagtagctgggactacaggcgcctgccaccacgcccagctaatttttgtatttttagtggagacggggtttcactctattggccacgctggtctcaaactcgtgacctcaagtgatctgcctgcctcagccttccaaagtgcagggattataggtgtaagccaccgaatctgcgtatattcttgcgccctttaatctgtactctatatagggagaaggatcttttaaaaacacagatgaggccaggcgcannnnnnnnnnnnnnnnnnnnnnnnnnnnnnnnnnnnnnnnnnnnnnnnnnnnnnnnnnnnnnnnnnnnnnnnnnnnnnnnnnnnnnnnnnnnnnnnnnnnnnnnnnnnnnnnnnnnnnnnnnnnnnnnnnnnnnnnnnnnnnnnnnnnnnnnnnnnnnnnnnnnnnnnnnnnnnnnnnnnnnnnnnnnnnnnnnnnnnnnnnnnnnnnnnnnnnnagcgaaactccgtctcaaaaaaaaaaaaaaaaagatgagattaacttaattccctacttaaaacccattagtcagttaccatcacaattacaataatctaaatctcttacagttgcttataaacaccaaaatgacctgacccagcctacctctccaacctcatctcatgctgctttcctcctttcattcatctctaactccatggaccttcctctaataaccaggccttgtcctgccctagggccttgatatgtgctgttcattctacttggaaggcatataagcagatgtcaacaaacatttgctgagtgaataaacaagtcaggcgcgtcataaggatgtagactatactaactgtcatctcccaaaagtaaatgcagtacatggtgtcagtatatataatagaatgcctagtgcagtgattctccattgtgagccatttttctccacgggggcattggcaatgtctgaagataccattggttgtcactactggtggtgtgctgtcagcataagatgggtagaagctaagggctaggaaacatcctgtagcatgcaggacaactcccacagcaaagaattacctgacaacaaagaactaacatttggggaacgttagtagtgctggggttgaaaaatcgttttagagtaatacatttgagttaggagaagtcaattttaatagcagtgctggcccttcaagtctgtcatattacctaaacagcttttaaaatttttttattttctattttattttcttttatttttgagacaaggtctggtcctgttgcacaggctggagtgcagcagcagatctcggctcactgcatcctttgcctccccagctcgagccatcctccctcctcagcctccctggtagctggaactaaaggtgcacaccgtcacacccatataattttttgtaattttggtagataacagggtttcaccatgttgcccaggctggtctccaacttgtgagctcaagcaatctgcccgccttggcctcccaaagtcctgggattacaggtgtgagccaccatgcctggcctaatttttttatttttatagagagaagatcttgctctatgaggcttgagtgcaatggtgccatcatggctcactgcagctttgaactcctgggtacaagtgatccttccacctcagcctcccgagtggctggcttatttaaatactagaacgaatcctcgtgtttggagactgctttctcatcctcaggaactgtgtgttatttccataagggtaaatgccactgctccacagactcatgaactactcctgttggtgggtatcttgctcacttcctcataatgctaagctgaactcagtctttccatttgtttttccaataataaaaatgaccagtgataaccaaagttgaagacatccctctggatcagatgagaaatctccctctttctcttctgccacttcaaaggcttttgaataaacaaagttttcatgatagccaggaaactccctgttatggagatatgattcgttctacatagagttcaccattaatttcaagaagattgggattaactacggtcatgcatcacataacagcatttcagtcaaccacagactgcatatgtgacagtggtcccataagattataatggggctaaaaaatttttattgcctaatgatgtagcacaatgcattactcatgtgtttgtggtgatgctggtgtaaacaaacctgttccgctgccagtcaaataaaagtatagcacatataattatatacaacacataatactcgataatgacagcaaatgactatgttcctggtttatgtatttactatgctttttattgttactttagagtatattcctgatttaggcattgttatcataggaggtgactacctaaaaaattgttaactgtaaaacagtctcaggcattgtgattatatacggtgactgctccatgcgtgttattgcctctgaagactttccagtggaccaggatgtggaagtggaagatggtgattttgatgatcctgaccctgtgtagtcctgggctaatgtgtgtgtttgtgtcttagtttttagcaaaaaagttaaaaaagtaaaaacataaaatttaaaatagaaaaaataggaaaaagcttaaaaaataaggatataaagaaattattttttatagctgcacaggtgtttgcattttaagctgtgttattacaaaacaaacagtttttaaaaatttaaagttgataaggtaaaaatgttagagcaaactaaggttaatgtattattgaagaaaatttttaaaatacatttagtgtagcctaagtatacagtattcgtaaagtctacggtggtgtacaatgatgtcctaggccttcacattcactcaccactcactcactgactcacccagagcaacttctagtcctgcaagctccactcatgatgagtgctctatacaggtgcaccgtttaaaatcctttatattaatagcatatttttaccataccttttctatgtttagatacacaaatacttaccattgtgttatagttgtctaccgtattcagtacagtaacatgatgaaatcgcctaacaacacgtttctcagaatgtatgcctgtcattaaataatatgtgactgtgtattgccttttcttgtaaatcaaaaattatggaattttaaacacatgcacccataattcataccctttgaagtaggactgcaaatgtaagatcatcatgcttcattatgtgaacatccagatatctattttgtgagactaatacacacaggaaagacgctttgcttcctttgaataaggtaaaagcaaactggccagattcacccaggaaatgacctacgttgggagctaaagtatttgttccagtgttacctgatttgggtcatttgggaaatactaaagaaaataagaatgtgctttcttagcctattttaaagagttttcctctctcagagcagtccaaaagggctagaaattatacctctggatatgtgaatttatggagcagtctcagttggaaagaatatcaagaataaacctcttgagggtcataactaatagagttaataccttcaagggtcaccagattatttttttctaagacactgagtggtacaacttattcttagatgtacatcacaaatacagaaaatttaacttatgataaaaagggcaaccttgataacaaataatgtatttcttaaagcacctgagggataatcataatttatccttgccatacatttgtcattgtgatgagctgtagtaagatgattcgtcagaaagcacagtttctgggacaatcaccacagaccactaagaaaaatagtgccaaggaacgatactgccaaaggcagaagtccagtggtcaagtcaaaacacctgccaaaaaagaacataagcaggaagcacagaggagtcaagaaagctactgataatgcagagctaggagaacaggagaaccagatggctggagaggagtgaagtgagtctccttttcacatcagcactgagagatgccgtcagttgcaccacagaattgaaaccacatgtaggctatgccattcattaataagagtgactaattttttaaagagaaattacaaagcactttgtacatcaattatcttttagacttcatggcaacctcatgggatatgagaggagttgtattattagctttattttatagatgaggaacttaggactcaaagagattaaataattttctaaggctaccagctatgtcttgactacaaagcccgtgatatgatagtaggccagggtttctcaccctcagcacaattgacattttgggctggattcttggttgtaagaagttgtcctgtgccttgtaggatgtttagcagcgtccctggcctctgtctactggtagcaccccctttcagttgtggtagatgctggtagcaccccctttcagttgtggtagatgctggtagcaccccctttcagttgtgacaactaaaaatgttgtagatattgtcagatgtctcctggggatgaactcattccacgtttagaactcctagcctgaggattaaagtatcagtctagtattagtatgagtctagtgagcaccaagagaaatatcctgttgtcccactgtcctcagtcccaataattggctaaaaggacttctttaggtggaaaatccataacaacttctctttgaactttcccaaacgatcctcatagccttccagcaatatagtgaaagggaaaggccaaaatggtttatggacagatgggtgggtgactggttgcttagagagagtcattgtttcattcagctatcgactcaacaaataaacttaacagttcctgggaatggtttcatagtggcatcagtgtttgagctgaagtaggtttagaaggaagattattagtttcctcaagatgagcttggggaaagatgaacatgtaaataacctgacatgtcagtaggctaggacttaaaaggctggtggcccacgacacaaacatattccagtcttgaggacctgtagtcattggtcatcttactttgtatgccaaaccatttgcaagcagtcttgctgtttactttcactgttgagttaactattgccttacaagtactgtttatctcagcccacatggtaattgccttaaatttaaaatcaaatcaacaaacgtttgcactccagcaaggctctataggagataaaacgacatggtttacataaaaagatacatagtaattaagataacatatcctaggtgccaaatgagtggttcagataagtgctatggcatgagaggatggaatgattgccatgacctggaattgtcagagagaactttgcaaaggaaattggtgagctgagcctgaatggatgagtagaaataatatgaaatctttgtaatagactgataattgcactttgattaatttgcccagcacaccatgttagaaggtaccttttaggttgattattttaataccacctacatctcattatcttggaatatatctaataatagaaaaaaaaaaaagcccgttggagctggggccagtagcacatgcctgtagtcccaactacttgggaagctgaggaaggaggatcccttgagcctaggagtttgagtccagcctgggcaacacagggagatgccatctcttaaaaagaaaaaaaaaaaaatccagttaacagcttatccatgatgattgtccagagtttattgtcagatcagccaagaaaatgcctaagagtaaaaggggttgtttggttttgtttgtttgttggtttgtttttagtcttgctccatcacctaggctggagtgcagtggcgcaatcttcgctcactgcaacctccgcctcccaggttcaagcaattcttctgcctcagcctctcaagaagctgggattacaggcacccgccagcatgcctggctaatttttgtatttttagtagagacggggtttcaccatgttgaccaggctggtctcaaactcctgacctcaagtgatctgcccgcctcagcctcccaaagtcctgggattaccggcatgagccaccacacccagccatgaaaaggttttttgatgactctcagggatccgaggaggctcataaggactgatatcacaggccccttggttcagttagatctcacagaatcaccattctctgaacaaaggtgccctcttaggaaatggggctcaagatttggagaggccttactgcatcctttctctatgactttggttattacacataattgcaggactgtgggaggcatagttatcaataagggctacagaggcttttgacttaagacactgcctggtttattccacaaacaccagctgtctagtagactttaataattatgcataaaatggatgcaacagatgttcctggacctcactgctggagattttgagtggcaaatgaacaaacaaactagatggagggggaagggcaaccacccaaatctccattcctaggggcttagaggaatcattttttcccttataaacagccactttgtaaacagttgtcactttttgacttttaaagattcacagtcttttccttttgtttactttgatgacctttgaaataagctgcaaccgaaagaggggaaaaaaattccatctttatttttctaaaagaggagtctgtctgttcccacagtgcattggaagccagcaaactcctgaggctgtctcaggcccactcaggttttggggcctttaggtacagttaagtccagttgcctcaaaccccttcactgggcagctcagagtaacgtgcattaccagatgctgggtgccaaacagttttctgaaagccagtctctctttacaaggcaaattttatagcctctctaaaatctggaaaatgcaaattaatataactttacatttcttttggcctcatttgcagaggaggcaacattagagatacagttctggctcttaagaaggctgccacctatctcccccatgaacagccttctctgcccccagtgggtttctcctctgacctgctcttcagccacattgggcacagaactgaaaagtcaaaggaggagaccagagaggaagagccttgggaatgtcaaagtttcttatctttgatttctctctcggtgaaaataccacacacctacctgtcccaataattagtatgtgaattttcacaataagtagggagttagagaatatatgacaaaaaaagaatatattttagcttttattgtttctgactctaaaagtaatgtactttgtggtgataggacagtcctgtatcttgattgtggtagtcattatacagattcatacatgggataaaatggcaccgtcctcccccaccaagtggacgtgtgtagaaaatggtgacagctgaatcaggtatgcagtctggttaataatactgtgcctatgtcagttttctggttctgacatagaactatagttacataaggtatcaccattggaggaagctgagtgaaaggtacactgactatgctgtttttgcaatttgctatgagtctacaatttcaaaacttgaaaaaaattgaaaagtaatgcatttctactgtaaaactttctaaattacagaagtatacaacattgaatgtaaaaatcccactcccccaattaacaacttggcattaataaaaatgggatcataatatttttgcagcttcctttttcactttacagtatgacttggagatctttccagttgagtctatataaatctacaacttctttataatgactgtacagtttggctgtacatgacaggatatatgtaggactatcccttactcttttcaactggtcccgtattggtcatttctaaactttcctattccatacaaccagtgctgctgaagatgatccttgagcatctacacctttgctcatatctgtttgtctgtaaaataaactcctagaagtgggcataacaaaattaaagaaagtgcgtgtcttccattttgatagcaaatgccggactttcaagtcgtggttttgcccaactccattgggtaccatttgtgtagaatatgttatgtatacaacatgactctgctgattaccctccaaaaaggttgtgacaatttatacttccaccagtgatgactgagagtatcttattttcttgtccatctatcagttgggtcttactctttttaaaaaaaaagtatgtgccaaatccataggttaaaaaaaaccctcattgttttattacacttcatcaaacactaatgaaattaaacattttctgatacatttattggctatttggatttcatctgtgaattgtttgtttatgttctttgctaaatacttgcagttcccaaagtatgtggcaaggcatgggatattttcaattttagggataagcacagtgacacttgccatctgtcagacattatgtgaattactagcacaaagtaatttatagtttttagcattagctcatactacattccttttgatgatgctgtatctttttgcaaagttgagcatttggtagttgctgtgataaaaaagcaagtgccctgagaaaatccatgtggaacaagaatgagtggtggagtccaaagctggggaagccatgaagtatccagtaggcacatacatcccattagtgagtaattgtggttatttaagaatgaaaggaaaatattttttctttcaacttatgtttattttttcacacagccactaagttattaaggcataaatacttattggattgtttggacctaactacttaataaatggaactcttagctatttcctttggccttagggcaccctgaaaaaattagtgaggtactaaaggtgctttgaattgagaaagtttgagaattcctgccatatttcattcagttactttcatttttgttattgatttgcaaattttgttccttaggggaattagcagatattttacccctggtttccctttactttttaatcttcatagtagtttttgctatataaaagttttcagtttttatgttgacatatttatacatcttattttcccctattcatggctttttgtttattcttttaaaaaacacttttacctgctgattataaaacatgatatgaaacatatttcattcccttctagcatttttatagtttcttttttacatttgattcttttctccgtctggaatttatcttagtttaaggctttagataggaatccaactatatcatttcccaaaggactggttgattgtcttaatactgtttattgaatgaatcaatgttttcactactgttcaaatgtcacctttatcatctacttagcttccacgtgcagaatttctaatgagtttatttcttggccttctgttctctatttctcttatagcccttaaccgttttctgtcttaaatttcagtatgtacatcttactttctgcactacatcataagctcttcctatattggttatttttgtgtcctatacactaagctattttatctttccattcttcctccctcactaaatctttttcacatttttatattatagaaatttttagatatacacaaataatataatgaatccccatgtatccatcactcagcttcaaacattatcaatcgatggctaattttgtttcatttatgccactatcagttccccttctcctttattgcattaaaattaactgtgtctgcagtgggaaagggatagttttttcagtaaatggtgctgggaaaactggatttccacatgcaaaagaatgacattggacccttataccttacacaaaagtcaactcaaaatagataaaagatgtaaacataagacctaagatacaaaactctaagaagaaaacacaggggaaaccttgacgttggccttggcagtgatttcttggctgtcacaccagaaggtcagtctacaaaagcaaatatggataaaaggatgatatcaaactaaaaagcttctgcgagcaaaggaaacaataaacaagttgaaaaggcagcctataattatcttacctctgttaaaatgatttttaaccaagacaccggcaataatgagtgctggcgaagatacggagaaaggggaacctttgtacactgttggtgggaatgtaaattagtacaatcactgtggagaacagtttggaggttcctcaaaaagcaaaactagaataccatatgatccagcaatcccactactaggtatatattcaaaaggaaggaaatcagtatatcaaagagatatttgcactctcttgtttattacagcactgttcataatatccaagatttagaatcaacctaaggcctaagtgtccatcagcagatgaatggtgtattagtttgttctcaagctgctaataaagacatacccaggactgggtaattttaaaggaaagaggtttaactgactcacagttcagcatggctgaggagacctcaggaaacttaacaatcatggcggaaaaggaagcaaatacatccttttcgtggtggcagcaaggagaagtgccaaggaaaagggggaaaaaccccttgtaaaaccatcaggtctcgtgagaactcactctctatcatgagaacagcatgaggataaccacccccatgattcaattacctccctctgggtccctccctcaatacatgggtttatgggaaccacaagatgagatttgggtagggacacagccaaacaatatcaaatggtaaagaaaatgtagtccatatacacaatgcagtactgttcaggcataaaaaagaatgagatcctgacatttgcaaaaatataaatagaactagaggttccatgttaagtgaaataagccaggcacagaaagacaaatttcatgttttcactcatttgtaggagccaaaaattaaaacaattgaactcatggagatagagagtaaaatgatagttatcagaggctggggaggaaaggaaagggggatagttaatgggtacaaaaatatagttaattagatagaatgaataatatctagtatgtgatagcacaatagggtaactacagtcaacaataatttattgtacatttaaaaataactaaaaatataattggaatgttcataacagagaaatgataaatggtcagtacacatcgtatgcctatatcaaaatatcttatgtaccctataaatatatacagctaccatatacccataaaaaataaaatgtagccaggcatggtggctcatgcctgtaattccaacactttgggaggccaaggcgggtggatcacttgaggtcaggagttcaagaccagcctggtcaacatggcaaaaccctgtctctactaaaaatacaaaaattggccgggcgcagtggctcactcccgcctgtaatcccagcactttggtaggctgaggcgggcggatcacgaggtcaggagattgagaccagcctggctaacacggtgaaaccccatctctactaaaaatacaaaaaattagccgggcatggtggcaggcacctgtagtcctagctactcgggaggctgaggcaggagaatggcgtgaacctgggaggcggagcttgcagtgagccaagaacgcaccactgcactccagcctgggcaacagagcgagactacatctcaaaaaaaaaaaaattagctgagcttggtggcccatgcctgtagtcccagctacttgggaggctgaggcagtagaatcacttgaacctgggaggcagaggttgcagtgagccaagattgtgccaccacactccagcatgggcgacagagcaagactccatctcaataaataaataaaataaaatgtgaaaaaaggcaacctacagattgggaaaaagtatttgcaagccatgtatcagataaggggttattatctaagatttatgagtaactcatacaactcagcaggaaaatatataacccaatttaaaaatgggcaacgaacttgaatacccatctcttttatatctcaaaaaagatgacatgaaaatgtccaacaggtatataaaatagtgctcaacatcactaatcatttgatttgcattcagatgaaatcaaaaccattatgtgatgccacctcactcctcttaggatagctgttatcaaaaaacaagagataagcgttggtgagggtgtgcagaaaagggaacccttgcatcctgtgagtgggcacgcagattgatgcctccatgatggaaaacagtgtgaagattcctaaagaaattacaaatagaaccatcataagacccagcaaatcctgcttctgggtgtgtatccagagaaagtgaaataacctgggtatccataaatggatgaatgaataaagaaactgagatagatagattatgtgcagtagaatattattcagcctttaaaaaggaggagatcttgccatttgctacatgaatggaccaggaggacactttgctgagagaaataagccagacacagaaaagtgtcgcatgatcttaattatatgtggaatctttaaaaaaataataaaagtcaaatatatagaacgggagaataaactcatggttagtggttaccagggttggagtataggataggaaatcagatgtaggtcaaaggatacaaagtagcaattacgcgggatgaacaagttgaaagatctaagtacagtattaggactatagttaataacccactcttgccctggaaggtggtggtagggatgctagttactatgtgaaataatgagtatgctaatttgtttcactatagtaaccctctctctctctttctctttctctctccccctctccctctcctcataacatgttctataccttaaatatacacaataaaatttattttaaaaaattaactttgtcttgactgaacaaatcatctgcatttttttattattattattattttttttttagtctcactctgtcacccaggttggagtgcagtggcgcgatctctgctcaccgcaacctccacctcccaggttcaagtgattctcctgcctcagtctcccaagtagctgagattacaggcacaagccaccacacccagctaatttttgtatttttagtagagatggggtttcgccatgttggccaggctggtctcgaactcctgacatcaggtgatccacttacctcggcctcccaaagtgctgggattaccaggcgtgagccactgcgcccatgtattatttttcattagtaagttttactacattaagagtttcttgttgatcttgatactctctnnnnnnnnnnnnnnnnnnnnttagagcaggtattatgttagtgtttagttaattttaaattcttcatatgcaggccttcatttgtatgttgggttaaggttgactatctgacaccactgtccaaaccttgcccttacgaacagcttgggggcccttgttgggggcccttgacaagtctcccctgtgaaggaactcataattactttatagaatttagaacaataggtgagagattatccaagacaaatgtatactttctctcttgtcaatactatttcccccaacaccttggtgtgaccagagtttacagaggtgacttttagcaccccagctgctgctgcaaatgcagcttctgttctgccacccctagcaagaccgtggtagaattccgaatcaatgaatcctctgttttcagcccctctccctgccagataaagagctctatactctagaaaaggatagtatagattgataaccatgatgatgggattaaacagttttttaaaatcatcaaattaaaggagatgttggagcactgaagagaaaaacagtgagttttagggtgggagtgggggtagttgaggaaagctggggagagttttatggggaaggtgacgtttaagctgggccttactttattaatggaatttcagtaggtggagttggagaaggtggggagacaaatgatggaacgtcctggccaggaaagcatttgtaagttgttacgaatgggaaattgttctttgtggccacagaataggttcgtaaagtggaggaaacagaaattaaatctagaaaggtagattgagcctttagtgccagcacattctttaggaggttgaaagtcattgatggattttgaacttgagagtgatgtcctcagagcttggctttaggaatatttctttgctggccatttgtaaaataagtgctggaggcagagaccaggcagttaagttgtttttagcatctgggtgcaaagtcttcttgctcctgaactaaaatagtgggagtgttaatagaaaggaggggatggatttgaggcccaaagtgaatttccagtccccagcaggctttgtgtttttgtacactgtagtccttaaagatattcacggcctgtttcctgtgattctctccccaaactagaatcagctaggaagtaattacactttgtacttagcatccttttcctggcagcaacacacaacacagtaaggtgtcatgttttggggacttagcaagaccatcctaaggatgtattcttacccaataaacaggttgaagtttagggaagcaaccacatgaaatgcttcctggctggccctctagcagattggtggattcatgtggacagcaagtgcccaccaagcactttcttctggggaatgaccaggttgaggaattcaggtatcccaaggttccggctctagcccagttgggctgtgaataaaaaacaacatgttgagctctgaacagatgatataagtaggtacttatacccagtaagcatggcaccctgcattgtggaagtcagaggcaagaggggtgctcctgagaggcctacggcctagttggggttcagttaatatgcctgaagcggaaaacaaatcctagcccacactggaatgactgcaaatgacatactgtattgttagagacctttctctctcttgccttcccaccttgccctccactcacatacaaacacaatctgcattttgaataatttttgctgtatctgtttcccagcagtgatgtgattgggcttgtttctgtgaattagaaagtttagattcctccctcagtcatctcccttttacccttttaccccctttcaatctgacctagagccataaaatacttctgcctgcctgcctgcagttctgtttgtatgaattaagtcgacaggataaatattcacattcccaactacaggctgaaacaatgtttgcctgttctacccagtgagtcgagaaaaaaagggggcctgacatcaccctatactgtacattcccagcatagatcatttatttaagtccctgaaaaaatacagatgttttaccagtcgaaataaaatcctgtgtaaacactaaggaaaatgtggcactgacttagctttgggggttgaagcagtgcagggagaaaactaggcaaaatggcagatacagaaattttatacttggctgaaggtgatagggtcaaaaatattcacctgcagtctgcatgcagcaagggaaaaacatagcatttgcttttaagaaaatacagttgcaaaagtggacaggttttttaatcttcagaatttgaggtttttaatgattacgatacatttcccccatttatatctgacctttgaaatgagcatctcttttcttattagagttgtcttttttcatagcctgtctaaccttgtcctgttattgctggatcctgctggtttctggagctcagctgctgttgattttataagggggaaaattgcctggaagccatgcttggtgaagaggaaaacccatctcagcgttgcattcccaaacaaccatatatcatcttgatcttgtctaacacaagttgctattttagtccagcagcataaactagacatattttactggtgcagtgcaagttttttcagggaactgcctcatgtctctttttaggcccatggcatttattcaaagagcatttcaaagctgccaaaatggaccccatgctttgcacagatgcctggggctcccctgagtctctctgtgtttagagtggaggggtgagggacagagggtaactgcttccaggttctccagacttctcagttcccctcaaactttcattaaggcttgcatctcaggggcaagaaatcagcctactcactgacaccctcctgcagtgcattccctgctcctcccagctgcttccatgaccaccccctcctcagggcagggctgacagtcccatctcttggcagttccatgcctatgatagtcatggatgatgctgttggcttgtacttgtttgtttcataatgtgctttcagtctttttctgattgggtcataaccatcttagggcaacaaagctttctcctgtttcttgtgctgatgacccctatgtccacctctaacccttctccaagggacctattacagctaggggtaagcatctgtcctctgtttttcccagtgtgattattaatagagctcccttttgtccctgaagaattcttttttgcgacataaattatcctaagtaaagcagtcatcacacggatattcccaaccaaactcattaattcccctccctcattcccaagcctgctgtagattctcttataatctccatcttgaaagatgccccttgttcaccagctgcccaagttaagaggctctttcctgcgccttaactccatgtctaaagcagttgccaagccctgcctctgcagcccgcagaagctctctcagatgtatcctttcctctccttccattgctgttttagtttagattggggtggggtggagatgtcacaaaatcagaatcctacccgtgccaggcaggtaagtgaaccaaagggggatgagtataaacacaggggctctctgcccattctttgttttcaaacttttagtagagatttgggttcagtaagtattttatttttttcttgattctccgaaagtttaaaacaaacaaacaaaaaagcctaagagctttgataaatggcattgaccctccgtcttagtgactagagtaacaggcaatagtaatagtggtgacagcggtggtctagagagtgcagttctcatctccggggccagctcctgctgctcagctccggccaggtgactgtttgccctacaggaaggtgggccgctatagccagatctaatttttcaaaatggaaatcaggatgactttaatgtgaaatatcccaattcataaaggttgatttaaaagtactgtatgggctaaataaaacatctgcagccacttttggcccaaaggctattggttttgagccgctggtttcaaccctcccctcctcttgtctagactactacagtagtcctgggcattccaccccttctgctatgacctccacactgcccctggcttttttctccaagttacagatctcatcacccaacagcactctctgaagaaatctttgccgtctgcagaataaagtacacattccatgacattgcctttaaggtctttgtctgactagacccgactcctttctccagctgtgtctgccaccaccctgtgcacaccctggctgttctctgcgcacacaggaccacttgttgtcccctgagtagtaccaatatttttaaaaattaagagactatttttagaaccattagatttagggaaaaattgaactggtaatacagaaagttcccaaatatttttctcctccccacctctttcccccaattttctcctactatgaatatcttgtatttatgtggtgcatttgttacaattaatgaagcagtatttacacattattattaactaaagtccatagtttaagattcactctttttgttggcattaccaatattttaatacccttaaaatgtgttttaattgttttcactgcttgcatacccttccctcgattctggcaagactgtttttaaggccacgtatgcatatcactctttctgcaaagtcttctctgactgtttatttttggaatggggctggaagagagggagcagacagaacatggaaaagaatcaacattgttatcacttccctagtgcgtgcctagtagtatatatattcttttaaatctctctacagtcctacaagttagatattattatacgccatttaccatggagaaacagaggttaagttgcccaaagccgcaaaactgataactggtttacacctatctctgcccggcttcaaaatccatgctcttccactttcccatgaggctggattcttagcactaatctagccttcctgcctccaccatcagatgaggcatccactgggatgaggagtacggcgtgattcagctctccgttccactccagacacagaagtcggcactacgatagctcacaaaacccaagggaatgtgtcctaaaggagtgaatataggaagaagcaccaaacaccaacatcgtttttatttggcaaatgcttgttgaattcctacagtgcatcagacttgttggagggggaggtcaagcatacaaacaaaagtgatgacgatgctgccatgcaggttgtaaatcatgaccaggcagagtcaggaaagctattgatttttcatgtctccatgactagaatgtaagctacaggaaagcaaggaactatctggtctctgctgcagccccttggacagtgcctggtaataagagttgtttaataaatatttgttgacaatgtttgccaatttaggacacataaaatgacactgaacttctgagttctcatgtgtgttggcagttaatcatcctccttggttctggcagctttggtttctctgtgcttggttcagtacaggcctgggtctgactgctttcttagcctcagaattctttgggaccagaactttaggaaagtgaggaagaaagagttgccttgctacttgccatcctttaagagctggtggacaaattgcccttcttgggagctgccggagctcctgagtctgaccttgatcaaatcttagtttcaaagggcctggccttatacctggacctcatgccaaaggatggtctcatttttcttgaacccaacacactaaatgtctatgaggttagttgtgtattcaaatatttttattttcttaaagaaaaatatctcaaaaacactaacctgtttcatacaattgcttataaaactttctttcctttctctttcccctgtcttctcttctccctctccttccctgccccatttttttccatgacttctctgaccctggccctttgacatgcttatttccgccacagttcttttcagcgtacctggctctccatttgtctcgtgtaaatagatcgctctccattcctggtgaataaccagggtcacaattgtctggtttgtacccaatgtgacagaattgtaggctgattttcataaaccagagctaccaagcgtttcaaaaacagtcttgtttttgccaagtaaggtgagcaaatataggactaagtttaaacatccatcaggagttatttttgaagtgattgcttctaaatgagaagcatttgaaaatctcacaggtttctttacaagtaaattccgaagtcatgcattttgctggtgtctgctgattaattgcgatcctgtgacaccatgaaaagccctggtggttggttttgtgcagctgtagagaaaagtaaagcaaagcccagtgactttgccagctctttcaggacagtggggattcaggctgaggaaggtattttttccctctggcagtcaccacataagaacagaagctccagccagacccattgctccagactccacgtcgggtggtttgggtccctgcgggggtgtggtgaaggcatgacatttgatctgttgcttctgaaataacagatccattattagacaaagcattttcagtctccacattgggacttgtgtgcactctcctgtacagttacttctgtttagaagaaatttattttgattctctaaacagaaggtgcttggcatgtatttgttgttggtgattgcagacgtctgacccagtaaaacctgccagtctacccatttagggtctgatgactctggattgattttatctggccttttctgtttctcattacccccttccgtatctaactctcaattatttcactattgtcagcccattgttgataggagagaaagagaggaaaacgttgaatctggttacacagaaagaatcattcacagctctagagaaggatataatagggaaagaaaacagatgttattaaaatagactttcagagttcttagtgtgtttatctatgcttactttgccacacccacctcttcctcttgatttagataaggaggctggagactgaaggatttctcttgacttgcatttctctccttggcactagccaaggtcaaaagatctcatttatgcccttgtccttattctttgtctgctatagatttgtactcctcacagaggctttgcggatgtcattgctgaatccagtacatacatacgtgcatacatgcatatacacgagtatccttgtataagtggggcacgtctgcattgctgcattcactcctgacatcgaagggaagatctgctaaaaaaaaaaaacaaaaaaaaccctaaatagttacaaacatcactgcccagtatttgctaaggcaagaattagtttgacctacttctttagccacgactgttctaatgaactcagacatgtaaaccagtttagactctcaaacaatgtatttttctttaaatttaagactttgactttaaaaggcacattttattttcatgtgcgacagctaacataaagatgtttgcatttctttgctgaaatcagtgtataggttgtttgtaactaataaactcttgtggcagatgattgttgggccacagtcatcagttttggggattgtgtgagaaacccatagcaaagtatggattaaggacttgggtttctcggcactgctacatcctccaaaaccaacatgcctttctgcaaagagaccagagctacattctgcaggtgtctgttttctttgaggggaacattttaaggaaacttaaaagggaggaactgagcatttaggaaaaatatattttcacagcaggatttttttttcttttttggtttaggtttttcatttgttgcaagcctactcagactccaaacacggaacgaattcagacttccagcacgagctgactgacatcactgtttgtaccaaagccaaactctggctggccaagaggtatgttaaaatcccacatgagcaaggagttatcaggggttaggaatacatttgagaattgctgtttctagttgtggggagttttaaaagtcattggcatgagttttctaaacttattggagtatttatccttttagaactttgggttgtggtaaagaaagaaaaatattttcttgacaatttttctaaaactgctaagtgactgaggggcatgtaatatggctttttgtctgcccaccaatcagcttgtttttgttgaaacctgctgcgtgcccagtcctgtgttagatattataacaatgaaaggcagtaattgactaaatcatgtggtacagactcttaggtgccgtggcaactcagagattagagattgctgtaggcttgagcaggcactgagggacagatagggtgtgaatagcaagaggggatggaagttgcctttcttaggtgggtagtaaggtagcttgaataagcaaggcaaaaaagaatagaaacatatttttcatccttgccattgttagtttatcctggaacttagaacatttactgtgtgaaagatgaaggagtaaaaggaatttctcatgtaatatacagggagtcctctctgtaatgccatgttcaaaatctgtgttgcaggactctggtggtggtaggatagtgttaactgcaaaggccctccgtaggtcctctgtaagttccaccagagtagctccagaagaggcgcatgtgttagtgttactacctttcctgccatagtacacgcatttaattaagagtcagtttattggccgggtgtggtggttcatgtctgtaatcccagcactttgggaggctagggcagaaggattgcttgagcccaggagttcaagaacagcctggacaacataacgagaccccatctctacaaaacaacgacaacaacaaaaattagccaggtatggtggtgcatgcctgtagtcccaactacttgggaggctaaggcaggaggatggtttgggcccaggagtttaaggctctagtgagctgtgattgcaccactgcactccagactgggtgacagagtgagaccttgtttcaaaaataaataaatttctgatgcttagagtttgagaaacaaacaagttgaaaaaaaaagaaaaaagtatattggctgtctaaagtagaagcctctcttttttatttttcaaaaagtgtgcttttggtcacttttgttgggctcttaccttctgtggcaagtcaagtaatgggctgtgtgaggctctcaaatcagtttaattcaacaaagcattgttgagcacaggctacctgctagcctttgtgttaggagatatagggatacaaaaatataaaagagctagtcctggctccagggacttccaggaagtgagaaagacgtgtataaataattttcatctggtatattaagtattataacaaatgtctgtagtaggtacagcattacgccagaagaggggtgagagagggctgacatcaaactggccatcaagagtgagccagaattttgccaagtggccaacacaggtaggggaattccaggcttaggtaacggcataggcagagacacagcaatatgaaacggcactgtaggtttgcagaaccataaggaagttagccctctggaacctaaagtgtaaggcacaagtggcagagaatggggctcaggaaatatgcccaggccacacagtgaaagctcctgtaagaaaccttttggtgaaggagccagcggtggatttcccaatgtgtggatgtgtgtatctcaattattgtctcaacattaatagctttggatagggatattgatggagaaattatcttgtgtctgaaatgccggtaaagttattgggagcctctcatttttagtctgttagtctattctccctttttttagacagggtcatgctctgtcacccaggttagagtgcagtggcgctaccacggctcactgtagccttgacctcctggggctgaagtgatccctccgcctcagtcccctgagcagctgggactacaggcacacgccactatgcctggctaatttttgtggggttttttggtggagaaggagtttcaacagattgcccaggctggtctcgaactcctgagctcaggtgatccacctgcgtcggcctcccaaagtgctgggattacaggcatgtgagccactgcacccaacttgttttctccattttatttagagagtaggagttgcttacccatgaagtgtttacccacgcctagtaccatttgccttctgtgtggctcttagcatcccaaagatacatatcacatcagtaccctcagctgtttgccaggtaataggccacttcttcctacctgttatttctggggatcaagaagtcagagctgtccagaaattatcctctgaaacctgcttctagccaggactgtcccaagtatcctaacactctagttcttaaagtgctgtaaggaaggagtttctgcccccttagcttgctactccttcatgcatctcgtagaaagtcattatccactggcttcctgagtccattacctcttgttggatgagatggaggagatggagcggcaggccagccattgagtggaccttcatgttgtgcagtgcctgaagatggctgacaaagctgccatcagcttcctctgcagctaagaggaagggaagtcctcctggccttttaaaacctgtcctgtggtccctattgctgttttctaattgggctttccattctcattccctctgctccccaccccacttctgatttttctccatgattttccagctctagaagacaaaggaatgaatcactgcaatttactgggtttccaccttccttgcccagaatgtaggacagccacttttctgtttccagtacagtcaactctctattatccaagtgtgaactttccgctttgtgggtggtctgtaaatggttcctaacaccaggcttccttttgctccccagcacacttttacaagtgttaatcagaatgtgttcagagcctgaaatagagtttggaaggaaaacatactgccagacagcacaatgcattccaaagctatgtatcagtttttctatattatccacatcattgacaggataactttgagggtcctaaatagcaaattatagaactgggtataagtgatgaagcctcggtgtcacatgcctgccctgtccctgaggtcctcttgttctgggagttgtctgtctatactagttaactccatgctcagacacaccccctctcgtcctagcggtcccttctcagaacagacccctgtctttactttctcacctgcctttcccatgaagatattacagtgcagagtattccaaattcaactactgaagaggcttttttatgtccctggtaatttacacatgaaagaaaaataaatgttcctttgagtctactaaggattttctgtatcttttgaatataagctatgaaaaattaatgtttttgcaaagaaaaaaatgttgccttaaattttaacaccgacacccttttccttccctaatttatttgatcattagcctgagtttcttcagtcccataagtacaaaaatgctagtggatatgtatttgtccttttgttctcaaagaaagtttttaaaaaattgattggcactattggataaccaattcagtctttaaattttgactctgaaattgagggaacataaaatgaagacttttgtcctatatttgtgttttgactttgcaagattaatagggatttatatgaggtgattaagcaatagccatggagttgttggggaatttttggtgatgagtggtcagctggcaacatggcttcaggaaaggactgggcttctgctcttacaggctgcttttcattccaggatgtcaaagccttaatggaaatcagctcattaatccttcaagtcctttccttcctgttttcctccactcctcccttcttgatccagtttactgtctaaagcagtttactaactactgaaagaaaactaaactgacctagaccagaaacgaaatgagagtagccgtctagtagggatctgctgctgtcctggaaaggatggcagtgggcatcatgagagaggaatcacccagtctgacactcatgctaattacaaaaacttttttttttaagttttttatttatttatttattttttagttttagagatgaggtctggctgtgttgcctatgctggacttgaactcctgggctcaagcagtcctcccaccagagtcttccaagtaagctgggattacagacatgagccccatgccctgccacccttgctgcttgcagattccagctcagctgtcccagctagatcgcttatttactttggctaagagttgtaattagtattatattaggcttaaacttttcagaagtgaatttggctatctagtttctccttctttggttataaaaggaaaaaaataagtgtgtatgtgtatgtttatatattgcatgtgtgtttcttttggtaaacttagtgaactaaatggactagtcagggctgggtgcggtggctcatgcctgtaaccctagcactttgggaggccaaggtgggtggatcacataaggccaggagtttgagaccagcctggccaacatggtgaaacccaatctctactaaaaatacaaaaaattagctgagtggtggcacacgcctgtagtcccaactacttgggaggctgaggcatgagaatcgcttgaacctgggaggcggaggtttcagtgagctgagatcatgccactgcattccaacccgagcaacagagaaagactctgtctcaagaaaatgaatgaatgaatgcatgcatgcagtggatgtgataaccagaaataaatatgtgccctactaaaattttttcaccgttttccccttcattgttgtgtgctgctatatgcttatcatagaaaattagtcaagtacaaaatttggaagagagtaaaagtctattcttaccacaatccataaatcactattattggttaagagttgtatgtaattccttcatcttttttcctatgcttttttttaactttgtcaaggctatactgtatatgtaagttatagnnnnnnnnnnnnnnnnnnnnnnnnnnnnnnnnnnnnnnnnnnnnnnnnnnnnnnnnnnnnnnnnnnnnnnnnnnnnnnnnnnnnnnnnnnnnnnnnnnnnnnnnnnnnnnnnnnnnnnnnnnnnnnnnnnnnnnnnnnnnnnnnnnnnnnnnnnnnnnnnnnnnnnnnnnnnnnnnnnnnnnnnnnnnnnnnnnnnnnnnnnnnnnnnnnnnnnnnnnnnnnnnnnnnnnnnnnnnnnnnnnnnnnnnnnnnnnnnnnnnnnnnnnnnnnnnnnnnnnnnnnnnnnnnnnnnnnnnnnnnnnnnnnnnnnnnnnnnnnnnnnnnnnnnnnnnnnnnnnnnnnnnnnnnnnnnnnnnnnnnnnnnnnnnnnnnnnnnnnnnnnnnnnnnnnnnnnnnnnnnnnnnnnnnnnnnnnnnnnnnnnnnnnnnnnnnnnnnnnnnnnnnnnnnnnnnnnnnnnnnnnnnnnnnnnnnnnnnnnnnnnnnnnnnnnnnnnnnnnnnnnnnnnnnnnnnnnnnnnnnnnnnnnnnnnnnnnnnnnnnnnnnnnnnnnnnnnnnnnnnnnnnnnnnnnnnnnnnnnnnnnnnnnnnnnnnnnnnnnnnnnnnnnnnnnnnnnnnnnnnnnnnnnnnnnnnnnnnnnnnnnnnnnnnnnnnnnnnnnnnnnnnnnnnnnnnnnnnnnnnnnnnnnnnnnnnnnnnnnnnnnnnnnnnnnnnnnnnnnnnnnnnnnnnnnnnnnnnnnnnnnnnnnnnnnnnnnnnnnnnnnnnnnnnnnnnnnnnnnnnnnnnnnnnnnnnnnnnnnnnnnnnnnnnnnnnnnnnnnnnnnnnnnnnnnnnnnnnnnnnnnnnnnnnnnnnnnnnnnnnnnnnnnnnnnnnnnnnnnnnnnnnnnnnnnnnnnnnnnnnnnnnnnnnnnnnnnnnnnnnnnnnnnnnnnnnnnnnnnnnnnnnnnnnnnnnnnnnnnnnnnnnnnnnnnnnnnnnnnnnnnnnnnnnnnnnnnnnnnnnnnnnnnnnnnnnnnnnnnnnnnnnnnnnnnnnnnnnnnnnnnnnnnnnnnnnnnnnnnnnnnnnnnnnnnnnnnnnnnnnnnnnnnnnnnnnnnnnnnnnnnnnnnnnnnnnnnnnnnnnnnnnnnnnnnnnnnnnnnnnnnnnnnnnnnnnnnnnnnnnnnnnnnnnnnnnnnnnnnnnnnnnnnnnnnnnnnnnnnnnnnnnnnnnnnnnnnnnnnnnnnnnnnnnnnnnnnnnnnnnnnnnnnnnnnnnnnnnnnnnnnnnnnnnnnnnnnnnnnnnnnnnnnnnnnnnnnnnnnnnnnnnnnnnnnnnnnnnnnnnnnnnnnnnnnnnnnnnnnnnnnnnnnnnnnnnnnnnnnnnnnnnnnnnnnnnnnnnnnnnnnnnnnnnnnnnnnnnnnnnnnnnnnnnnnnnnnnnnnnnnnnnnnnnnnnnnnnnnnnnnnnnnnnnnnnnnnnnnnnnnnnnnnnnnnnnnnnnnnnnnnnnnnnnnnnnnnnnnnnnnnnnnnnnnnnnnnnnnnnnnnnnnnnnnnnnnnnnnnnnnnnnnnnnnnnnnnnnnnnnnnnnnnnnnnnnnnnnnnnnnnnnnnnnnnnnnnnnnnnnnnnnnnnnnnnnnnnnnnnnnnnnnnnnnnnnnnnnnnnnnnnnnnnnnnnnnnnnnnnnnnnnnnnnnnnnnnnnnnnnnnnnnnnnnnnnnnnnnnnnnnnnnnnnnnnnnnnnnnnnnnnnnnnnnnnnnnnnnnnnnnnnnnnnnnnnnnnnnnnnnnnnnnnnnnnnnnnnnnnnnnnnnnnnnnnnnnnnnnnnnnnnnnnnnnnnnnnnnnnnnnnnnnnnnnnnnnnnnnnnnnnnnnnnnnnnnnnnnnnnnnnnnnnnnnnnnnnnnnnnnnnnnnnnnnnnnnnnnnnnnnnnnnnnnnnnnnnnnnnnnnnnnnnnnnnnnnnnnnnnnnnnnnnnnnnnnnnnnnnnnnnnnnnnnnnnnnnnnnnnnnnnnnnnnnnnnnnnnnnnnnnnnnnnnnnnnnnnnnnnnnnnnnnnnnnnnnnnnnnnnnnnnnnnnnnnnnnnnnnnnnnnnnnnnnnnnnnnnnnnnnnnnnnnnnnnnnnnnnnnnnnnnnnnnnnnnnnnnnnnnnnnnnnnnnnnnnnnnnnnnnnnnnnnnnnnnnnnnnnnnnnnnnnnnnnnnnnnnnnnnnnnnnnnnnnnnnnnnnnnnnnnnnnnnnnnnnnnnnnnnnnnnnnnnnnnnnnnnnnnnnnnnnnnnnnnnnnnnnnnnnnnnnnnnnnnnnnnnnnnnnnnnnnnnnnnnnnnnnnnnnnnnnnnnnnnnnnnnnnnnnnnnnnnnnnnnnnnnnnnnnnnnnnnnnnnnnnnnnnnnnnnnnnnnnnnnnnnnnnnnnnnnnnnnnnnnnnnnnnnnnnnnnnnnnnnnnnnnnnnnnnnnnnnnnnnnnnnnnnnnnnnnnnnnnnnnnnnnnnnnnnnnnnnnnnnnnnnnnnnnnnnnnnnnnnnnnnnnnnnnnnnnnnnnnnnnnnnnnnnnnnnnnnnnnnnnnnnnnnnnnnnnnnnnnnnnnnnnnnnnnnnnnnnnnnnnnnnnnnnnnnnnnnnnnnnnnnnnnnnnnnnnnnnnnnnnnnnnnnnnnnnnnnnnnnnnnnnnnnnnnnnnnnnnnnnnnnnnnnnnnnnnnnnnnnnnnnnnnnnnnnnnnnnnnnnnnnnnnnnnnnnnnnnnnnnnnnnnnnnnnnnnnnnnnnnnnnnnnnnnnnnnnnnnnnnnnnnnnnnnnnnnnnnnnnnnnnnnnnnnnnnnnnnnnnnnnnnnnnnnnnnnnnnnnnnnnnnnnnnnnnnnnnnnnnnnnnnnnnnnnnnnnnnnnnnnnnnnnnnnnnnnnnnnnnnnnnnnnnnnnnnnnnnnnnnnnnnnnnnnnnnnnnnnnnnnnnnnnnnnnnnnctcactgcaagctccacctctggggttcacgccattctcctgcctcagcctcctgagtagctgggactacaggcgcccgccaccacacccggctaaggttttgtatttttagtaagatgggatttcaccatgttagccaggatggtctcgatctcctgacctcatgatccacctgcctcggcctcccaaagtgctgagattacagatgtgagccaccactcctggccctttttttttttttttttttaaagtagagacaggggcttgctctgttcccaggctggtttagtacccctggccttaagtgatcctcctgccttggcctcccaaagtgctggcattacagacatgagccaccacactcagcccagtttttttaagttgaagcttaaatagaataactatccctgtattacttcattcaacaaatacctattgagccctgctgtatgccaggccatatcaaatactacaactgtatattaaaaccactacttcagtgtaaagagagcaacagaacagagtcttatcaaatcgaatcattgacctagaattttagaactggaaggaatctcatgaagtttattgtattaagagtctactctcacccctgtacatgtggagtactacagcccacagaggctggaggatttatccgttttcacacagttcaccagaattaacatcctacctgacaactactatcatttgttgagggcttagctcccggcaccttactgggctctttgtacttgaccacactgcctccatctatccagtgtttttatgtgagggttttgcatggcagtaatttaagccttctctagaacagtgattctcagaaagaaaatgtgcacgtgaatcacctgggaatcttattagaatgaagactctcattcactaggtctgggtggagcctgagatcctccattttgaccagctcccaggggacagagtacgtaccttgaagagccagggtcagagtgccaggctctgtgatcttccaactcccccatttgaaacagtcccatccccattgcctcattctcaagggcttgtggctgagcttggagctacaggagagggctgaggctactgaagggatcagcccaagattctctccctacccacctgggatcacctgtgttgaggggcttcatggccccagggctctctatgggaaatccatactccgttgtctgggccgccatcccagtggcctcagtgccctgtatgggaccagtgttttttttgtttttttttttgttttgagacggagtctcgctctgtcgcccaggctggagtgcagtggcgcgatctcggctcactgcaagctccgcctcccaggttcacgccattctcctgcctcagcctcccgagtagctgggactacaggcgcccgctaccacgcccggctaattttttgggaccagtgctttgttggcatgcagtgtgtttatcatttttaaaaataacagtctgatattctggtgagaaaaacaggctctcagaaatacaagaccaggttccaaggttacaaggaaagcaaccttgggaataaattttttgcataaaacagtgctgatgaggggaagagatggtagagggagctaatgtttgttgaaagcctgctcaatgtaccagacctaatgacttgctaccccaagttaattctaataatctatccacttccctgtccagctttcctgtaagtgcccttcacacccccatgcagtcctccatgtgccctttcatgtgtgcctcatctgcttctccatccccctcatccatactccagtcactttcctgtctcctcccctgtcaccccctatccatactcccatctattctcctttttctgtcttacttactggaccccactgagctgagtggtgtgctcctgaagggcctgtggatttaagtgtttaaggaaaatatgcttatagagacaaagctgaggcttttgtgtggcaatcccagttcttccctagggggtctgtggctaactgcagaagttctggtttaggattctattttgctttacaacagctgaaaacagcatttattttctcaccaccaaatttattcacacaagagacttacacttcccaggcagaaatactgggttttaggtctgcttccattttcccactgtcctttagctccttcccaaatccctcatgggctggtcccctcctgaagaaagagatccttcttttgcaatgacttgaaatagaaagaggccacagccttttgccacagctgcaagttgctgtttcacttccatgccgttgaaatgaatccagtccaggatgattgttaaaatattcagatgatcatgtggcattttaaggctatcatttgtggtccgtgccaaaactttaagggaagcaagtcttaacagggatcgctagccacagagcaagtttccaggcattgctaggggttatgttttgccttttggtttgtttcttttctttctctcgttttttcttctttctttctttccttctttttttctttcaaaaaaaaggatcctcctttttttaattttagaaaaagttattttttttttttaggaaaaaaatggaagaggtagtaactgcttttcaattcctagattttactggaagagagaggttctcattaggacccgtctttaatcctccagcacagcttgttcaaagtcacatgagcctcatgcagatttgaatgatgagagaaatgaagttggtatattttaaacccaagcatgctgacatatgttcacttccctttcagacgtctcaggaatgtctaaggtcatgatatctccggatgagatcctgtttgtgttttttaaatacaaaaggaaacattatcgtatttcaacccaagccagtgggacaaggtgcaaaacattttcttcattaaatatcccttttacaaatacagcctcaagttttaaaggaataagctgtttgaggaagagtgaagtttgaaaatatatgaagtatttcttgttgacagactgagcttatggaaacgagtctgggtgaaaacagtcagaagtgatcaatatattatcctgggcccttgagcaagtcgtccaagatcaaagcttcttcataccgcagcgagaaataaaaatagtccttttacgcaactgcacacacaccaagaattcaacccccaactgctgatgctttctactttttaaatatagaaatctgcaaacctaacctggagatggcagttagttcaatagagggctcagaaatctctgtcttgttccacttgtagctgttggcttactggggtgttgctgttggaagatttggacaatgttgtcattgctcagcttgcaagggagtgcaggctttaagtgtcttcagcacattctcataatattatgtaaagccctaatgtagtgggttatgttttttcctttagcatgtaacatcttccatcttttggataaattaacacctttgttaccttcattgagccattctcagtcaattaaagccaattcagagtcacaaatattacaagacaatggtttaggcacagtgggaaatatatgaatgaacgataattgtctctgtttcagaaaccccacaagtaagacaagtatggatttaaataactataaacaagattgtgtcaatgctagaattagtcaaagtgtgttgcagaagcagagaagggagaaataaatgccagcttgtcagggtaggggtgtcaaggaagtcttcaggaagagggagaagtctttaaaggataggtgagtttaattattagataaggttaattttttagcatggtggcatgggcctgtaatcccagcttcttgggaggctgaggcacaagaattgtttgaacctgggagttggaggttgcagtgagccaagatcgtgccactgcactccggcctgggtgacagagcaagattctgtctcaaaaaaataataataataagattaattgtctcagattggagactgagtaaagttacacttgtatagtacctttgttgccaagtaaattgtgaaggtctcattgcccaagtacacaaaaggtatcttagtacagcgcccagcattgtgggaacctaatgtgtgtgtgtgtgtgtgtgtgtgtgtgtattagatatatataatggagtctttgttgtcagagttcagttatggttgaatctaaatgaaaatttagacagtgaaatacatagaagtacatacagtaagtacaagagttcagaaaagaatgtggactaagatagtcaaggaaggccttatcagaggagttagatatttgagatgggcggtagagcagagtgtgatttggaaacaccaaaaagtggtaggaaaagagcatatcaagatggtggaccaaatgtgcagtgggatactggagggagtgcatgtgatgtatcatgggccagtgaggagatcaagctgagggaaagctgctgtgctttagagagcagtgcaagatttgataagagaccagttgtggaaaccctcagatgtcagccagaggaatatggactggatccaggagttaagaggaagttagtgagctctggctgacactggtaagtaggctgctgtctatatgcacatgaaatgcactaaatgctttacatctttccaacctcgcttagtggtcatcagagtttctagtctctcttaaggattaacagaaatctctctattagcagtccttgtcacctggaagcccctgttgcctgcctgggcagctagtaataggaatagagatatctgtatgcacttgagaccacataggttttgtctttccaatgttgctaagagtaccatagaaccacagaatttataacagtaaagggaatttagagatcgtctaatccagtggaattcattcttcaaacaagcttatgtggaaattcaagatattgaaaatagtagagatggtttcaatatggtctaaactggggtgggggcccggagacccacctgcatggcttccttcctgttggtagccccagaagggactaagagaagcaccctaactccctatttcaaaacagtgatctaatctaagctgatatttgtagaagaggtaatagacacgggggcaggcgacttcttcctacttgaaagatatggctgtctcagaagatggctcaaattagggatgtaaatagcaagtttgttttttgcctcttgacctgctttcttcctctcccgaggcctgatcatccttgtggaaaattctacaactccatgtccttgggctgccaagggccctctcttaggagctgccttccatggatagggcttcatgctccagaccttcttgccatcaaaacttaactattctatatcccttttcctcactctcagctggctggctgtccctaaattttaatatgtaaataagtttgttctcccgggtcacacagctgttttccagtagtgacctggtagagacagcacctttaactgaagtccgtaactgacgcaggctttacggcagtgcgctggcctggcaggagcacatctgccctcatattaagctgctcagccctgatacatttgtcccgtgtggctggggtttcggccacctccacaagggctgtgggcagcatgagctggtcttacatgaatgggccaagggagcatcttggagagaggccctcctaagtctcactagcctttccttcccctcagctgccagtgatgatcaggcttcctcagcaattagactggcctgggtgcctctgggaataacaccttcccacgcaagctcaggggctcactctaggactccccaagccagacgggtcctcaccagtccgcaggctctgcgttcctgggtaaccacaaggagagtcacatctagaggcacttggtgaatggaaagcctctagccagaaaacacagtgcagtgccattgaggagaggcagagaatactcaaggttagcaagtcagtggtctggcctctgctggactactgcccagcaaggtgtggcctgtaatttccttaggcctgagttttcatctgtaaagtgggaagctctaaaatgaaggtgtgaaatagaggagaccaggggagggcatagtgagtaatggaagtgtaaacataaaagtgctaagaagatacgggaactatctattgtcaaataacgaagtctctatcaacataatcgccacgttgaaaatgtgcctttatgctggtcctcacagaaacagctgcacttggagccttgcttttcaccagactggctaccaggatataacaccagtctacgtggtttctaattgcttggcccaatgtctcacttttcacctgattgtgtttgggacacatagatacaatttgttttctagaaaaccttgattctattcttggtttctgcccttgtcttggctaggtcacttgagctactttgttgatttataaaaatgggaatgataatttctatttttcttccttcttaagaattttataaagataaaataagaatactttttaaagagaaaacttttaatataataagatgttgatattgttattatcattcgtactatttttaccagggctaatttccaagtgtgtgccttgccaaattcacatgaccacggtcctattgacggtgctgttagaaattctccccttgtgatttacatagctcaggcagcatccagaagatttcatccacctcacctatttatccttttttatgcttttagggagaaagtaaggtttgaaaagaaaggggacttgtgttaacattctatataagatttgaagctatatatcttccaagccccaaactgtacaataaaagttttcttggatactacttttctcccataattcctagcacatagtttattaagttattaaccagcaattactctggcagcatattaaactttacttttaaacaagtcacagagggagggaaacacgcatctctcgtaaaaggaataaaaaacatacaccctctaaaacagtttccccaggctttgaacaaatcccaagccccacaccaaggtctctttttcatcattctccgcacatagcttgagtgttagtacagtaatgagaacaagatgcctaatagaaagatggaaaaatatgaggattctggaggctccctgggggctctctggaaaggcaggtgattaatattaggagggaaaggcaaaggcatggcattgaagctgtgggcttcctccagcagcagcaatcctaagggaaacagaggaggctgtggctttggccctaacctaaaaagaggaccccagtaccttttgcagactgctggggccttgctgaatgcctacccagaaccctggtaggagtgggtaaggccctctgctttcacagattacattccccaggatccaaacctgctcttccagggaaagcccactgtgctctgcaatgcatagctggaccttcagtcactttctggacagactaacagctcacggtctctcactttgtgcatggtagctcagtaagaattccgtataagttggtccaccaccagagcagggcatggaggatggcttcactttaaaaggaaaatccaagtaggagggctgtggggcagcatctacatatggctgtgagtataaacactcacaaagctccagaccaagaaaggcaggatggatgttggggcataccataaaaatgcagctctgccgtcacacctcccccagggagggcaaggtaaacgagcagtcctggtagccagccaggccctacaagcttctgccagctggccctgcatgcacagctaaactctccatgttacagtgggggaaatgacttgtttaaatatatatattctacagttcatcaccattttgcattttgatttaaacaagtcccctattgtttgtctaagagtgccatatgatggttacttggctgggggccatggtaaaaattggaaatcggaatggcagatgtgggttctttttatttaatttatacttccacatttacatggcttaatgtggcctccatcaaaagaagtacctcctaactcatatccacaggatatagccaaatataaggagaggcagtatctggtccatggacagctgttacaatgatgtgaagtgctcaagactacaaagatggccagtgggatctctgggagaaggggaagctcaacaaaatatcctgggttcagacagccattcagcgtatcctcagaggtagttgtctggatcattagaaaagtaatcctctagaaatagaggaggggctttgaagtgagttggtttttaggggggtttgttgttgttattgctgtttgagataggatctcactatgttgcccaggctggtcttgaactcctgatctcaagcaatccttccatgtcagcctccagagtagctgggattataggtgcctgtgccacctaaacccagcttgaagtgaattttaaataaagggcaggaggcgggtagatatgtgtcaagtggagggatcataatgggatgtggaaacatgttgtagactaatttcccctttttcaaccattttccctctcccattcttctaaccaccccccctctttacttctccccccactccccttctcacctgccttctctccctttgcctctcacccacttttcctcttaacctggtttccttctttccagcccgttatgggcctgctggtggtccctaggatattgcttcattaactccagtgctggctccatgacaagaagcttctagtacttcttgcttattgtggttgagaacagaagtgatctgagctgcttaaataggagctaagataagagaactaccccagatgggctgggatgagcctgccagctgcacctgtttgattttttggaattccttctctttcaccagctcaaacccctccaatgcctctagagccttcctccatgacaatcatgacaatcaaatcaatcctctgtttttatgtgtatttttttctccacatatacccctcccccaacaagatcataagctctgcaaagccataaccttttcctctccctccccttcccaccccatgtaggatatcccccgtactgctcagtaaatgtttctgtattaataaagttaagccatgtgtcttagagaccttaacagacagtagcaacctaaagccaaaacagcagtttccagccctctgaagatggcagtgaattctggtagagcttggtaagtccaaagtgaattccctctctcttccagggagcccaccaaggcttcacaatattgagtggggaccccagctgtccagtgtgacttgagcttatgggatcccactggggtcttcattctttggaacttttagagctctgaaagactacttctgtttcgggcccctgttgactcatcccatatcatttcctgctaatcccactggccatctttctagtcttggcagttcacatcattgtaacagctgtccatggaccagacactgcctctccttatatttgattatatcttgtagataggagttaggaggtacttctttgatggaggccacattaagccatgtaaatgtggaaacataaattaaataaaaataacccacctctgccattccaattcccgccccccataccattgtcccttttagcacttgttattctctaaacatgtcatgtccccaagtctttggacatgctacttcctctgttgtggtcactttgcccaggtctacctcctccccattctccaactctctgccaaggcccttcctgactcacccagacaaacagttactctgttaatccctccttttggggcacccatcatactctagcatgactggttgtgtgttttcccaactacactagtggctttcaagtgtttttttttttttttttttgacagacattgacaacaagaaacagcttttacatatgacctaatgcatatgtttgtgtgtatatactgtgcacacacacatgaaatcatgcacagtcggaaattttagtagctgcgtaagatataaattgccaaaaatgcaacagagagggaatttgctcaagatagagcatatttaatttcaggaatgtgtgctttcaagatatccactgccattttggatacaaagcataaccctattgatgccattcagtataatgtagggtagcttattacctggaaaagaaaaagaaaaaagctagaccagtcaattattttacttaaacttgttgcattttaatggttatttaaatcttaaagataacttattaaaaattattcttagcaaggacttaatggaaagctgatacataacaaaaaccttagtgaaacaatcccttgggaaatctctgaacttctttaaatctcctgccctctgtccttactacactactttgatacactctgattatattttcctcctttctccctctgtcttcctcctagctccttttctcccttcttcttctgcccccatctctctcctcttcccttcctccctccttcccttccttcctttcttcttccttctttctttccttcctttattgctggtcactacccactagttgatttcataacctaacatacatttggaaaaacactattcaggactctaagttccttgagggcagtgactgtgtcactgaatcacttcatcttcctatttccaaacccaccactattcctggctctcagtagcctcttaataaatgtttcctgaatgaataggcctcagttaaaaacaaaacaaaaccaaaaaaaaaaacctgcagccactgggattccggaagggacaggaaaagtgaataatttatcacagacttccccaagacttctgctgtcctctagacactggggcttttgtggacgtgtctgggaagccctgccctctgcctgccttgtgcctctcccaacttccaggagagagggcaggagatttaaagaagttcagagatttcccaaggcaaaaacatattaatcaagttcttaagtggatatttaaaaggacaaatggtaaaaaagagtggaagaaaacaggattcttaacagggccttcgtttcatcttctgtatgtcaacttcgtccgcatagtgctggattccttctcctccttcgaaagccactagtaatgctgcttttcagtgcatctgctacatgctgatcacttctgattttttttgagcactataaatcttcattatgctgtgctccatgccaggatttttccatttgggggtagaaaaattccccaagcccaccaaaaccctgtggcttagtttcctgtccagctggcgtgctgctcttcgggattttgttcccatcatcaaagtggcttgacagactgagaacaaacctctggctcaccctgaacttacagtgcaccatttccaagtcagaacaaacaccaagtaatagcaagagaaaaagaatgaaaaaaattattttcctgacttagaagccagttcagagtgaagcccaactctgtgactccagacagggatgttataaggccttggctgtcctcaagggtggagtcatgaacagtgggctccgggctggaatttcactcagagtcatctcaaaggagaagccatggatggactcctttgtggccccaaatcttctgtttcctggaatccaaagcagcagcatttgagggagcctcccatgatcttgttgactacatcacacttggccccaagcctcacagttgtgggagcagtcagtgattcctgaagtgtcccaggaggccagtaaggtcaccagcctgtaccgggtctagggaagatgcagaacacttcagcctggcagaaggctctaaagatcgtcaacctttcctctgttcattttgaaatttttaaaaatatgctaacttagctgaaaatctcatggaaaccaggctcctcatcagacttgaaagtcaaaccggtttctcaacaacttctctttatggttctgtatggctccacagaaaaccagaaaaacatttggggcaagaagctatgactctgtgaggccacatgggagcaggcagtcaattattacactaaggaacacccagttagcatgaagtatcccatcacttaaaagcctgaccagccttcctcttgtttccaccttatcaacgcattctcttatcttcccaagctgccgctccttggaactggagaagccaaatgaattccctctcacatctcttaccctctttccaaatgcccttccttatcaactttgtctctaaattcttcccatcttacatggcccggttggaagtataacttcatttctccagtccaccctggtgggttggtgggttggttggttggttggttggttttttgggttaactccttacatcctattctgaagtttgtctttgtttttgtctccaaaactagtcaaaattctcaggtcagtagccgtctcctgtgcatgtcctccctgcacctagctcaaggctggatgcacaggagacatcctatctgctttctcaggccactggctttcctccctgaatggctcttgctttagcagggggcagtctcaactagtagaaattttaccattgggaatgatatcaatgaagtttttatagactgtgggctttccatagtggatggaagagtaacagcagaaagttacgattgagagtcccagggtaaactagagacaaaagataggggcagggttaaaaagtagaaccccaggctagacaatataacaagaccccatctctacaaaaataattttaaaaattagctggatgtggtggcatgcacctgtagtcccaggtatttgggaggctgaggtgggaggattgcttgagcccaggaggttgaggctacagtgagccatgatcatgccactgcacttcagcctgagcaacagagaaagaccctgtctcagaacaaaacaaaacaaaaaagaaagaaaagaaaatgaggcaaatctctatgttcttaatagaatggtatccaaaacatattagtgaaaaggagtgatgatcagaaccgagtatatagtaagccatcatttgtataaacaagtgggtagcagatagatgcttataaaagaatagagcctggcgcggtggctcacgcctgtaatcccagcactttgggaggccgaggcaggtggatcacgaggtcaggagatcgaaaccatcctggctaacacggtgaaaccccgtctctaataaaacatacaaaaaattagccgggcgtggcggcgggcgcctgtagtcccagctactccggaggctgaggcaggagaatggcatgaacccggcaggtggggcttgcagtgagccaagatcgcaccactgcactccagcctgggtgacagagagagactccgtctcaaaaaaaaaaaaaaaaaaaaaaaaaaaaaagaatagaatgtgcttggaaggatatgctagaaagtagtaatagcggttgcctcgagaacagtatatgggcagggggtagggttgtggaaaagggatttcattttcattgcgtgtccttttgtgctttttcaattatttttgcatgtgttacctatttatttatttatttttgagacagagtctcactctgtcacccaggctggcatgcagtggcatgatctcagctcactgcaacctctgccttccaggttcaagtgattttcctgcctcagtttcctgagtagctgggaatacaggcgcccgccaccctgcccggctcatttttgtgtttttagtagagatggggtttcaccatgttggccatgctgatctcgatctcctgacctcaggtgatccacccacctcagcctcccaaagtgctgggattacagacgtgagccaccatgcctggaccaccagcacactcttaaccagcctcttgtttttcagtcttaccccctgtaatcccagctacttgggaggctgaggcaggataatcacgaattcaggaggtggaggttgcagtaagccgagatcataccaccacactccagcctaggggacagagcgagactctgtctcaaaaaaaaaagtatctgatacatatttttcatgttagacatacaccagctccagatataggcaattcaggatagaggtgtgaataaactttaaggaaattgtaaaacttagtttataggaaatgagaaggatggatttcaggattaagccacatggaaactcactagccagaacacttgtgccaatatcaatgccatcccctaatcccatgttggaagtagagaagggcaaggaatggacagttctggaacatctgccatggccaggcactgaggtgggcattttaagtttactgtgccacattgaacactcacagtgactcacagtaagtctgtcttagtccattttctattgctgtaacagaatgtatgtattgtatttattgtaacagatggcactggcatctggtgagggtcatcccatggtggaaggctgaaggcagaaaagagcacgcaagacagagaggaaatcaagccaaactcatctttataacaaactcagtctccaaatcactagcccaatcccaagataacaacattcattcattcatgaggacagtaccctcatgacccaatcacctcttaaaggctctgcctcttaacagtgttacaatagcattacatttcaacatgaattttagcaggggcagtcaaaccatagcagaggtgataatacagttcccattttacaagtcaggaatctgattcaggtcacagagattgtaagtgggaaagccaggactcaattgtaggtctgtccctactgtctctactactcacattgtattattagtacaccaaagacgttttggccttttcatggccaaagacactcaagagtcaaggcccttcagtgctgttcttaaaaagaaagtctttcttcatccttttgtatatagatacccaaatctgagcccacttactatttctactatgttgttcaaagagctgctccatatattgaatgaagaaaaaaatccatttattggggaaaatgtcatctccagtgtttgttaatcttgccatgtgtctattgttcagctggttatttcaagtccacagatacagcttttcatatgtgagtgtaattttccttctccacaatactaaatctgattttcatgactgattttttttcccccaaatttctatacttaaaaatgtagaataatagagtaccatctccccaccccttctgtcccatcttattttcaactaactaagataggatcttggtgtttgttttcattttattttatttgaagccagagcatagagttgttatctattttgtctacacatagccttggcctccatcatatggtcaaggatttcatttgctcacattagttgcttattttcttgccatcaatgattgtacatcatttcttaatatttgccatagctgcttaagccccatcatataccatagaaaatacccatgttctccttcctgagacccagacctaagggagagaaaatctcaatttatattctgttctttacctttctaggcaaaatccatgtttggtgaccagagctgtatatattgatattctcttcctattgacttgctgcctcaacagatctgcaaaggacaaccagccaggtatgattcatagttatactgtattttggaatcgttacacatctttgaaatgtggatggcgttttgagtggctctgccacacactgctccaccttctacttttgtaagactaaccacacatcaaaattaaacagtgtcatatagttccctcatagaagtttgtcagggaaacttgttcttgtttatttggaagtttgccgtttattttctagttggtcattcagggaagagtgaactctactcagataccctctctgcatctacgaccccggcttttttctattttatgtattttctttgaaaggtcattattttgaatagctgtgagttcattctgttccattctgtggagataactgagctgggctcatttgatgctgggtatttgagactctcttctcaaatcgacccctacaccaatgcacttatgagttgctgcctcagactctgactttccacatgtttcttggtcatgtaagtttctggggatggaccccagatccacatacagttgctctattttaatcatgatttgcaaagtggtttttcttttttaagggaaaatggcaactccaaataaaatttttttgatgtgtttatataagaggctacaggaagtgctgtacatgaattccaggccacggactgaaactgattttcatcagcacaaactggaatgcagggtaatgagtctgcaactggttaaaatcagcctcttctaattgattaggcctgtctaaaggaggctagaattacaaagtcagattctgagtgcaagcagaccaggcctttcctctgttacatttagtctgtcaatgatttgttgtcttcggtaaatacattcaggctgtcaatgttcagctctgttcatatggaaccctgttcccaaattcaaaccaatttaaaatgctttgcaggagggaggtcggggaggtgggagcatgcaaaaccgtctcacccagatcgatgtatattagcccacaaaacccctgtggccatgcagaggtaataagaacgtgctagactctcatcaagtccacatccctggataggagtagctgttgtatcctctttgtagtgtaaaatcatatggttttatagctataaagcaatcccagtttatgcctcttatcccagcataattattaatagtgcgcccttttactcttgaaagtgaccaggtttgcataataaattactggtcaccgtggctgtaagggaccacagagttgcatctactccagcttacccttaagtcaactggagtctaaagtttaaaaagagactatgaatccaatgttaccaagtaaattgctttagatttccaccatttctgtatttcagttccaaattccatatagctttgtaatacttccctgcctatgtatctaaagggctttggccataagagatttgttcattgcttacaaatctactcactgggattctggcagtttatggttgactataatcattagtttatttgaactgagtttttcttggctcagtgccattattctttgtctagaatggttaatccttatatgttgtaaaataccttctttcttccccaactacccatcctttactgatgagctgggttccttgaagatgactttagcttttttgaaccatccatttctccaagctgttaacattatttagagtttataccctaattaaacagatcacagcttgttttcacaagctgtgtttaataacttaacagtatttcacttgcatctatatattactcttaaagatgttactctacagagtaagatgtgaggacaggatgcttttattctagtatgacaaccatagctctaaaaattttgtcctgcactatccaatactgcagccactagtcatatgtggatcttgagcgcttgagatgtggttggtccaaaatgagatgttttgttagtgtaaaatacatactacatttcaaagacttagtatgagttaaaaataaaattcctcaataattttgtattaattatgtatgtgttggaatgatgtttttgacatactggattaaatttaaaatgtattatcaaaattaattttacccgtttcttttactttttaaaatgtggcaactaaggtcagatgtggtggctcaagcccataattcagcactttaggaggttgaggcaggaggattgcttgaggccagaagtttgagaccagcctggcagcatagtgaggcctcatctctaaaaaaaaaaaaatttaattagccacatgtggtagcacacatctgtaggcctaggtacttgggaggctgagacaggaggattacttcaacccaggagttcgaggctgcagtgagctatgatcatgccattgctttccagcctgggcgacagagcgataccctgtctcaaaaaaaataaaataaaataaaataaaatatggcaactagaatgggaaaaataacaaagtaaaactgtcattgaaatatatgtgtttaactttgtcaaatggagagataggaagaattgtaaatgacatcataacccaaaaggtacattacagtaacattattaatgatgaagaatgtggctgtttacattttaaattacatatatatgactcatttttatcagacagcacaaattttattcagtcctcagggaattgccctcataaaatcgctagatgtgtttgtatttatgtatatgtatgaatgttcatgttcatataatacatccacacaaacagtaggagcatattttctttctttgaggatggaatagatttttagaaataaccaaataccaaataaaatggcaattaagatggaaagcactgtttgggataaaaataaactgtgcttaatgtagtgaagtctattcttgtgtgttttataaattgttccccaaaacaggttgagcaatagataaatatatcaccaaataaggtgatcacttacttggatgtgtagatttcaatatgctttcaaaataatgtgatgatattatagttttagcatataagctccttgaaagaatggaccatgtcttagattctttgtcgtctaagcacatagtaggccctcattaaatggatttattaactgtttgatgaaatgcagttctcctcagtttttagaatagtaacagctgttatcaaaatacagattttatttaaactcatgtatcaaatagatgtgaattcattttctgaattcaagcaaggtgtttatgtgtgtatgtaaatatatatctgcctccattattagctcacaaagtccagagtaggaagtataccacatagactgaagccaaacctctgggtttgaatcctagatctgccatttactaactttgtgaccttaggcaagttatttagctgctttgagacacgttgtttccattgtaaaaggggacagtaagatctatatcttagagtggttgtcagcttatacatgtgaagctgtctgtgaagaatgtgctttgcatggcacagaataaatgctcaataatattaactattattaatatttttttgttgacatggagtttcactcttgttgcacaagctggagtacaatggcacaatctcagcttaccaaaacttccgtgtcccgggttcaagcaactcttctgcctcagcctcccgagtagctgggattacaggcatgtgccaccacgcctggctaattttgtattcttagtggagacggggtttctccttgttcgtcaggctggtctcgaactcccaacctcaggtgatccacccgcctcggcctccctaagtgctgggattacagatgtgagccaccgtgcccagcctattatcattattattcgctggaagctatgcatctaatccagtctcctccagccgtgcagcattgtgttcacctcctcgccttcactgttctcatatttttaaacatcttcaggaaagaagaaatgcctgctttcctaggaaaacactgcagtataacatacctggcttagaatgtcaggagtccacttgattagggttgcccctgtccctctgactgatccagaaaaagatcattttttttcttgtttatttattttttcattcatcagacctgctagcctcagagatatattgagcacttgtatctggagatagagatgaatatgccttggtcttataagtaggtgcaatgaaggatttttcagatgctgtattaaaggaagtatgtatgggacacatttgaggcactaaagaaagatcatttctacttgagaggacaggaaagacttccttgaagaggaagtggttgaacagagttttgacagtgggtagggattcaccaggatgggcaaggtggaggtaggtattacagacagaggtagaagcatggccaaagctgtaagggcacaaatcaagcacagccttcagagcactagggacatggcaactggggtgttgggttcaaggccaggcaggtgtgactggtgaggctgaggaggcagaaactcagtcatggaaggcctcattcacaggccaaagtccaaggagcctcaatttgaccctgtagacaaaggagttcattggacgatctaagacagagagtaggactgtgtggtttttaagacaatgtgacatttctttctctgccctcatccttacaggatttttaggacccttatggaaccaagttcctagtgtcactccaaaataatgtaactggctggatgcagtggctcacgcctataatcccagcactttgggaggacaaagcaggaggattgcctgaggccaggagttcgagataagcctgggcaacatagcaagactccatctctacagaattttttttttaattagctggacatggtgttatgtgcctgtagagtcccagatactcaggatgctgaggcaggaggatcccttcaacccaggagttcaaggctgcagtgatctgtgatcacaccattgcagtccaacctgggtgacagagcaagatcctgtctctaaaaaaaagaaaaaaaagaaaaaaaaagaatgtaactggagatgcattcactttgcttttgcccagccattttgataatcaatattaggggtttgggaggtagggagtggggaatggaggaacagactagaatgaaagccagcgctatggtaaaaggaattattttagaatggtgggattacaggggagattccttctcttattttctattttactaattttatgaaacataattctgtttcattatgtgtatatacatatgtttaaattaaatgtatttaaatatgaatcttgaaagggattgattattccaaaggaaatgaagtaataacaatttcagggaaacttttttggatggaggagcatctgctcatcccctctccagtcctattctgtaaatggccttggaaggctgttcctacctctgacatgtcttagaaccacgttgaagggctaggggcataaacaaggagaaaaacagtgaaggagaaaggcagagaagattattagaaaagcttaagataatgatgtgttttatgtaattcaaacttttatcatagtgcttcccaatcatttgaggtttcctcagccattaactaggttttaaaattttcaaatctgggggttttgttttgagttttaaacccacaaggactctctgtcccctgtgttctttttcctcttctgaatccagctgtcatcgttagtatatatcagtttcctgctggaatggaaagaaaattatagtgtccagttgtagttgagggaacaagaaagaaaaagccgaactgccacaaggactcagagggctgggtctcaggctgggcagcgacatggagacgagagctttaattcttatattaaacccatcttaaattatttgctctcaggttggaaattttccattgaaatttctgtttacagaaatactatctaagacttgactaaatatttacccctttgacagatggactttctgtttctcttatgcccacaccccttaaaattgtgtctgtcacaactactgaattgaacattttcttttaccaagtatttaaacaaatacctacctgcactttcagactttcattttaagctctcttgttgggttttatgagcgggtttttcctttcctagtctccattttataaattttatgcaacttggttcttttataattatgtgtatgtgtaatatattgaaatatgactcatgaagaggattgattaatcctaaagaaatgacatagcaatcatagataggaatattttaggctgataaggatttgtccatccatacccttcatataaatgatctcagaaggctgttttcctacccctgaaatatggataggatgcccattataccctcatttttaggaaacattgttttcaatctcatcctccttgtttgtagggggctataataatagtggccaacatttattgagcatctatctctatgccaagcactgccaagcattttatgtgcattaatgaagaaagtactaatgttccttcatgagaccacagaaactgaggcatagcgagaagtgcctaacatcccatgtgtgctaaggtggcagatcctgagctctccagctgccctcactgtggcctcacggcacaaccagggccagagtcaggaaacatcagtcactcgcttagggaagggagtccgagaaccctcttcgtggactcaacttcccaggcttctgtccctgctgcagaatgcccaggccacagagaagggacccccttttcaggagcttccacgtcacaggcttttatggggcctttcttgcttgtgtttctgtttcccatcctgagggtgtgtggaataatacgagagcctacccaggactggagcgtgttattagaaagagcacgcttgactgctcccgggcagccacctgccctttttcccttggaaagtggacctatggccactgcacaaaacacttcctaataccaggctgctggtgactacattttgtggtttctttgttagttgatatttatagttcagatctcatcactctgccaagtgcaataaacattttgttttaactggaatataacttttattattgttattatttttcttttaaatgtcttaaaagtgaccagcttgtgcaagtggagtcagaaaccctaaatagtctaaatgccaagtcagtgcgctctgtagatcagtgtacgattagaagacaggctctcatttattactgcttgtatttatataatggaagttaggtaacataagcccctctgcaggccagcttagatgttgatgatgcttaaatggtaaaatctgtgagaaatgttcaacaatgccctgtatttgtactgcctaaaacatgaataatacatatgtgacatgaataaataggtcagtgatttttatgacatattaatttcctttacctaagttcctgggaaatatagctgaacagttacagagaatgaaaacaaacactggcatcttacaaacacctgctttgattatttagtctaattaggttaaatttaactatttccattttaacaaattgaaaacaattcttatctgttcctcggtcatgcactttatcagtgttggatgcagatgtgtttaatatgacacagttggtgctgttttctcagctctgggtgggaaataaaaaggaattgagaacatatttttagagtcttctggggactttgtatttctgggcctatagctatgaaattttaaggaggaggaaaaaaaaaaaaaaaaaacaggctttgttgtcaataaattagttggttttccccaaaacactggaactgtcatctgaactgctgcttgtgccaaaattatctttcccagggaacagtgagcttctaaaataacagatgtttcctagctgtctttcagaagtcagaataatatagggtatgttattagattgctaggttaacgtggtgtttactctgttaattccaaaccttgcgctgagtacagaggcccacaattctttagaaatttagtttagagatcatagcaatttaagtgacttacccaaggttacacagctggttagtgaaaagggtgagctttcctgactccttattcaccgtccatttctgtgaccaaagttaaaggcctcatataatgtgagagttgtgtctgtggcagaaccgtgtcatgaaaccttctacccacattttcatcccaggagtgaaataccgttctagtcaacaactagggtctcagaacatctgtgatttcttttttttttttttttgcagctttgtcacccaggctggagtgcagtggcacagtcatggctcgctgcagcctcaacctcatgggcccaagtgatcctcctgcctcagcctcctgagtagctgggaccacaggcgcatgccactatgccaacctagtggtttttctgtttttgtttttaattttttattttgtagagagaggtctccctttgttgcctaggctggtctcaaacttctgggcttaagcagccctcctgcctcggcctcccaaagtgctgggattacaggcatgagccaccatgaccggccacatctgtggtttcagtgttctctgttcctgcctttcccagctccagctgcacatcacagataatctgaaagtagttgcccatgtcagttaaatttttatgcaagtagtttttgaaagtctatttaagatatttcatgtaaatggaatcatacctttgtggcctttcatgtgtggattctttcacttaacatgttttgaaggttcatccatgttggtcattttgttctttttatggctgaataatattccagtatatagatatcacattttgtttatccattcatcagtttgatggacatttgggttgttttcacttttgggttgttatgaataatgctgctatgagcattcatgggcaagtttttgctgggacctgtgttttcaattctcttgggtatttacctagaagtggaatgtctgggccatatgccaactctaagtttaactttttgaagaattgctaaattgtttccaaagagtctgcaaccatcttacatttttaccaccagtgtatgaagtttccagtttctcaatatccttaccaactcttactgtccatctgttttattaatagccatcctagtgctgggatctaattgtgcttttgatttgcatttccctaatgactaatgagtttgagcatcttttctagtgctagttggtcatttatatatcttcaaagaacggtctcttcagatcctttgcgcatttttaagtgagttgtctcttttttttttttgagacggagtttcgctcttgttgcccaagctggagtgcaatggcacgatctcggttcactgcaacctccgcctcccggtttcaagcgattctcctgcctcagcctcccaagtagctgggattacaggcatgtgccaccacacctggctaattttgtatttttagtagagacaggagttcaccatgttaaccaggctggtgtcgaactcgctacctcaggtgatctgcctgcctcagcctcccaaagtgctgggattacaggcgtgagccaccgcgcccagccgagttatttctctttttattctcaagttgtaagggttctttttatgtccaagatattaatcccttataagacacacagtttgcaaatattttctccctttctgtggatttttactgtcttcataatatcctttgatggacaaaagtttttagttttgaagtccattgtatctgttttttattgcttgtgcatttgatttcatgtctaaaataattgcctaatccaaagtcacaaagatttgcacccatgttttcctctggaagttttacagttttagttcataagtttatgatccatgttgagttaatttttatatctgatatgaggtacagattcagcctcattcctttggcatatgtgactatccatttgtcctagcactgtatttcaaaaagactatcctttccccattgaattgtcatggcacccttgtcaaaaagtcagttgaccataaattaggggtttgtttctcgattcttaattgtattccattgatctatgtatctatccttatgccaggagcacactgtcttgattatcattacttcatagtaacttgaaatcaggatgtgtgagtcctctttcttcatttttcaacattgctttgcctattctgggttccttgcattttcacatgaattttaggatcagcttgtttggggggggggcgggaaagggagggagggagggagggaggaaagaaaaagccagctggaatcttgatagggattgcattaaatctgtagatcaatttgaagagtactgccatcataacaatatgatgtctttaaatccacaaacactggatgtctttccatttatttaggtctctttaatttatttcagtgggtgttttatagttttcagtgcacatatacttcatgcacatctttcattaaataatttgttcctattctttttgatgctgttataaatagaattattttcttaatttcatttgtggattgttcattgctactgtatagagctacaattgatatttgtatattgatcttttatcctgcaacattactgaacaaacttattagctctaataggttctattgtggactccttttttcttgactaattgctctggctagaacctccaatacagtgttgaatagaagtggcaagagcagacatcttgtctcattcctgatcctaggggatcttaaagcattcactcttttaccattaagtatgatgttagctgtgggttttttatagatgccttttgtcaggttggagaagtttttttccatttctagtttgttgagtgcttttaccacaaaagaatgttgaattttggcaaatgaccttgctgtgcctgttgagatgatattgtaattttatccttcattctgtcaatatggtgtgagttgtgacattttattgctgagtagtattccattgtgtgtatggcttgtttatactaatttactagttgatggtcattagggtcgtttccactttttggagatcgtgaataatgctgctctgaacattcacatagaagtgttcggtcatatgttttcatttctcttgggtaaaaacctaggaaaggggttactggatcatatgataaggattgtttaatgttacaagaaactaccaaaatgtttaccactttgcattcccaccttgcattcatgagaagcatggctgataatgttgagcatcttttcatgtgtcatgtttgactatgtatgtcttttttggtaaagtgcctattcacatcttttatacattgctttttaaattcgagttgtttgtcttactgggttgtaagagttttttctaaatacaagccctttatacaggtaaatgttttgcacagtttttacctggctgtggcttgccttttcattttcttaacattgtcttttgaagagcagacatttttaattttgataaggtcaaatttatccatttttttgtgtgttttagactttttatgccctagtgaagaaatccttgcctattccaaggtcacaaagatgctccctcaaaacttcttctaaagttttgtagttttgcatttaacatttagatctgtagtctatctcacgttaattttcatgtgtatcatgagatatggttggcattctttttttttttttttttttttttttttgttatgggtatccaatgtttcagcaccattttttgtttgtttctttcttcgtttctagagacagggtcttgcactgtctcccatgctggagtgcaatggcgagatcatggctcaatgcagcctgaaactcctgggcttaggaaatcctccaaccccagcctcccgagtaactgggactacaggcacatgccaccatgccctaattcttaaatttcttgtaaagacaaggtctcactatgttgcccagattggttttgaattccagggctcaagcactcctcctatcgtggcctcccaaagtgttgggattacagacgtgagccaccgtgcccagcccccaacaccattattgctttaaatatttcctccatctcttgccctttttcctttctttctgtgattccattcaaatgtaaattaagtcacttgaagttgtcccatatgtcgctgatgctcattctttttttttaatctgttttacttttgatagcttcaacttttgtgactctaaattcacaaactttttcttttgcagcgtataacgtactactgttctcttttaaaaagaatgatacagggtctcactgtgttgcccaggtggccttgaactcctaggcttaagcaatcctcctcccttggcctcccaaagtgctggaattacagatgtgagccactatgcccagcctctgctattattttcatcttgtgaattttttttaattttagatactgtattgttcatctctagaagtttcatttgtgtcctttttatatcttctatatctccctttatcatgttcagtcttcctctagattcttgaccatatgtagcaggtgtacgtaactgttttcatgttctactttctaatttcattattgctgtcattttaggatatttttaaattttttttctcctggttatgggttatattttcccacttctttgcgtgcttataattttttattagatgccagacaatgttaattttatgttgtcaggtattggattttgttttattctttaaagtgttggactttgttttagcacacagttgagttacttaggattggttggattcttccaagacttgcttttaagcttagttctggtgggttcaatccaaagaggagcctttagtttagggcaaatgtagctcctctaacaggatccttctgaggtcctacatgatgtcccatgtgttacaaggtctctactctgggtgagagaacacataactattgtgagcctacatgagttccaggaattgtccagctcactgctttcttgcagttctgcagttctttttctagcctttcagagtttcaccccttgcatgtgcaaatcagtattcagctgaaagattcacagggtcccttggtctacagatctccagagctctctcactatacagatttgttctctccggtattgtgccccacaaattccagctgcctgagtcttcccaaactctgatatctcatcgtttcaactgagccaagacctctgggctctgggttcctcctctctgtactggggcttagaagttgcctcttggcagtaagctcaggcaattgtaatgcttcccttattgtcttcttgttgagtcttgcattgctcatatccaatgattaaaaacaataatttcatacattttgttcagttttctaattgtttatggtggaaggacagttcctgcaatggttaatctttcatagacagaagcaaaaatcacttccatcaccttgtcttgaggcctcttggttcttcaactgtaaagtgggcataataccctcagaggattgggataaatgtcataaaaattgtgaatagtcacattacaagaaaaagccaacattgggagaacagcagctatcaagagataaaactgatagcaagaacaaagaaatgaatggccatcacatccagggtggaagcagctggatcctgactcccaggctcatttccattgattacctggcagaattaacctaactcctctctccatgttggggctggacttcacattaaaataggagcactcctagtacaaccagattttgttggattttgctagcagctgtatactgcaccttgcaacatcacagatgatttggtgccaggaacctcttcagtctcagactctacagaccctcaaccccaggggcattcccagaactaaattgtagcactagcaagggactgagatgggtgatcctagcctctcttactacaggtgaggcaacagaggtaagcccattatgtaaaggaatcttcccagttagcagttgactcccaagttggttttgcagtatcccatggactaagtgtggaagagaagccccaggtcctttgtgagttagagtttaaattaaacagggtcatggtggacaaatttctgattcccaatcctgttcttcggaccaattcgccgaaagaaccagaagtaggccgagcgcagtacctcacacctgtagtaccaacactttgggaggccaaggcaggtaaattgcttgagcccaggagttcaagactagcctgagcaacatggcaaaaccccatctctacagaaaatacaaaaaattagccaggcatgggggctcgtgcctgtagtcacagctccctgggactgaggctgagttgggagaatcacctcccagactcatttccattgcttcctgagcctgggaaggctgcagtgagctgcgatcataccactgcactccggcgtggtaacaagagtaagaccctgtctcaaaaaaagaaagacagagagagagagagagagaagggagggagggagggagggaaagaagggagggagggatggacaggaaaggaaaggaaaggggaaaggagaaagaaaaggggaaaggaaaccagaagtagtgtatgcttagaaataactatgtttgtgtctttgggttgtcatgtgtttatccacagtagttctggacttcctccctgtgttgggcaaaggctgagatgggatggtgggtggaggcaatagtaaaagctgtgggtcccacccagggcctggtgagctcatctttagcctacccagatcctttgagctcttctggctctgctgtctcccaggccagaggggctgtgttttgattttatgggctgccaggatagtctttagagtatcctcagaagcacatcctccttcctcagcagccgatcgggaatcctacacttgaaaaatacatgcctttgagagtatgctgggacaaggaaaagtaggaatgttttccaaggggtgtgtgtgatgggggccacacctgtgtaagcagagatgatggggttcagagaaccagaaacaaaccaaggcaagaaataaacaaccagtactagttcagggtgagacaaagttagtttccaaatccctccaccaggtcattcaacatgtttgtaactggaggggcccctggggtcaggattacagtttactgggagggtcaaggattaaatagaagagtggaatttccctttgataaggagaagccaagatttattaagtcagtttattctgttgttattgttgttgttgttcctatggtttccttttctctacaaatataatttttttaacagagaaattgcataacaggacattgacgttaagagtgtacaaattatcatctgtgattatttttagaaccagtttatccaccatttcagataaaaacttttgttggatctgattacagagctctgaccaatgctacaattctttaaaatagaaaaagcaggctgtctccctatgcattgaaagtgaagtctaggccgggcacagtggctcatgcctgtaatcccagcactttgggaggccgaggtgggtggatcacctgaggtcaggagttcaagaccagcctggccaacatggcaaaaccctgtctctactaaaaatacaaaaattagccaggcttgatggctggcgcctgtaatcccagctactcgggaggctgaggcagcagaaccacttgaacccgaaaggcggaggttgcggtgagccgagattgcaccactgcactccagcctgggcaacagagtgagactccatcacaaaaaaaaaaaaaaaatgaagtctgctctgtattttttcgtctcctacttttttaaggaggttggagatactgggagagaaaggggagaatagagaaaactttagaacagttatgtctgcaaaggagaaattcacttatttgttcattcattcctttgaggcagagggaagaacatgtgcaagtgcagacagaatgaggagccttctgagactcagatgaccttccacggtggcacgaccagtatcactgccatttgcacttataagtgacattttgtagtagtgaaaccatttttttgttgttgttgggttggtcttttcagtcctgaggaggatccttctgccttcatggatactgactgctgcttctaaatagaacaagttgtgtgtgattaccggggctttgcctcccccatagtcatctttgctgggaccgagaaaatgttgtcactctgggccttgcattttttctttcttgccctttttattttggcacaagacaatcaggctgtcttgatgagtgacgtaagagtgaaggccaggaactgtataatatgcaggagctctctgagcactagatgaaggggttgacttatgatgaagggccatggtgtacaaaaacaaataccattaaacactagaattacacacattcagcatggcaagatgtttacactgtggaaagcatggatgatgtcagatggtctgaggtggaggccttgaaagtgcggtccctgccccagcagcatcagcattacctgggaatttgttaggaaatgtaacttttggggagccctgctcagacttactgaaattagaaacttggggtgagcagctaaagtttgagaaccgccggtctgaggtaacagtacagcaaccctacatgggacattgaccactgattggaatgccaggggaaactgccctctctaattattattcctcccccacccccggccccacctaaagttaaattcacctaaattaaatgctgttatgatgtaacttcactgtatccataattatgtggtaatgatattaccatttttttttcagaatgcccttgttaaagctatttagattaacatgcatcttttaaaaattatattgattttttttttaatttaacaaacctatatgagtagctcagaagagcaaaggtgaatggcccacaggccttcccttttgggttatgcttctcctctagagaggagagagactgccctaaataatagaacaggacatgctaagtatgatgccatccctgctcaaggtctgtgctactgttaaatcctctttcagcagcctgtcaaaattagcactctcccttggttagttagggagtggcagttttgatatctaaagttaactttcacaatgactgttcatgttgcagacattacactggaatctccaacctaccaaagaaccaaacactgctaagataacacatctgatattaccaaaggaattgtgtgaatgggccaccatactcctttatgcaaaacactcctcagtgccatgaaggactctgcaaagttccttcagtttcttcctgagaatagaggttcctaatagttatgccatccaaacagactagcctcaagaagcttttatcaacttctccaaagctgtaattcactagtgctgctccctggtgatttcaccagcccatggcacaaggaagctatagcaaaatgatactatagcaaatttgtcttttttttttagttttttttagtttcttagtttttagtttttagagatagggtctcactatgttgcccaggctgaagtgcaatggctagtcacaggtgtgcttatagcacactgtagcttcaaactcctgggctcaagcaatcctcctgcctcagcctcccagctagctggaactacaggtgcacgccacgatacctggctacatctttttcttaaaaacaaatttctttaaattatcttttatgatgacactatgattttttcccttttggggcataagagactttctttcatgaagtgataatagatagtaggtttttaacatcctttgcaaaataaaaagctggcaacttacaccagtctgccacattgtgacatttcattaggaattacttctccaggaaaccaggacatagcacagtaggaggtattgtccttccatgtgaatccagccattcagccattcccttgaaggccagaaatttacttgctccaaagagtgaaaaaaaaaaaaaaagttaattccaaaaatgaaatcaaattggatgcaagaatcagtcacacatacttgagtggctgagttgactgcactggtgggaaagtacaaagactttccaaacaaggagggctgaaaaaagctccagccaggaagagttagaaaaaaatcactctaacttaggaaaagtacgatggggccattaaagcagggacttgattctttcactcaaacatttgggctttccaacaaagaagaaacccaaatctatcaaagttgaggttgcaagtagaaaaggtaaggtttcagatgggtgtggtggcatgcacctatagtcccaggtactcaggaggcagatgtgggaggatcacttgagcctaggagttcaagatcagcttgtgataaaccatctcttttcctttgtaaaaaaaaaaggcaaagaaggtttaaaaattacagtctgctaaagaagaaggctgctaaacttcagactggatcaaacttcagttatttgtgtcctgcaaacgaagggcactcatagaaatgaaaataagtaccacgtgttcatctagactctttatggcaggacacaaacgttgttgcaccagggaaaaatcccgattgtgaaaaccctttgacgaactctacctgcagtgggaaacagactgtaccactaaaacagtagccgtcaatccctgctgtacctaggtcactttaaaactagactgctaggtttcaccccagagatgtggtcaagtgtcccctgacatgagtatttttctaaagctctcagattaatgtaatgtgctttctgggctgagaaccactgtgcaagagaaaagcagcatttctttgttagctgctgcagtagcttatgctgaagtattggacattcctgcctccaaccttctgttccacctagagaccctctcactctgggtactgagatggaataggggaatatggttcctgtggtccccacccagttggagctccatgagagcaaagccaggtctaattcactgctgcatctagacctagaacagaacctgcacacaacgagccagtgtttacattgctgaaggtctggccaggtggctggcctgcctgccaggaacattcatagtgcgtattcgttcttttgaattcttggttattttctctcctttggtgtttttatttgaaagagaaattggggcatggtgaattttctagttcttcactactgtgaagtcctgcgctggaatcatacgtgctctgcgtgaaactccagtgccctacccacccataaaccctgccaacccgcgtgaaagttggccctgaggagtgtggttctcagctggggtgcagagcagaattacctgccagttcttaagattacagctgtctgcgcccaacttgaaaccaactgaatcagaatctacaagagtgggattcaggcatgtgtggttttaatatcattagtcattacctttacttgagggcagtggtttttaaaatacctggatcagcagcagcagcttcacctgtgagcttgttgaaaatgcaaatcatcagccccatcccaggacctgcagaatcagaaactctggggtgaggtcgaggcagcagtccgtggtttcacaagcccttcggggcatctccttgagtccgagttgctgcacaaacagaatattttttccaagcagcagtttggagaaagtgcctaaatgaatgtcacttgataatttcctcccttttggctctaggtctaacctctcttgctgctcctctgttgacacattaattcagcaaacttatttaaaggtctctctgtgtctgttctctcctaactctccctgacacgtttgccctttcctctcctctcccagcaaggttcctgtgcagcctcagggcccaccttaaattgtgttgcctcttgaaagccctttttccatttcttccagtagaatatcagtgccatcgcattcattttggtctttcatatggctttagtgtgtattctctttacctaccttttccttagtgaccttgagcaagtaacttcacctctctgtttcctcatctgtaaaatgggaataataataataatagagcctacctcattaaagagttaaatcttgtctaggtgctcagaataatatcaacaagtgtcaattctaaaagtaatttttgttctggcacggtggctcacgcctgtaatcccaacactttgggaggctgaggcaggagaattgcttgaacccgggaggcggaggttgcagtgagccgagatggtgccactgcactcagcctgggtgacagagactctgtctcaaaaaaataaataaaagtaatttttattcgtagcattaaatcatgggtatgtaatattttgtaattacagaatagtacatgacatgtaaatactcaacaaatgtcagctttttttttttttttttgccttgagacagagttttgctcttcttgtacaggctgtagtgcagtggcacaatctcggctcactgctacctccgcgtcacaggttcaagcagttctcctgcttcagcctccggagtagctgggattacaggcatgcaccaccacacctggctaatttttgtatttttagtagaggcggggtttcgccatgttggtcaggctggtctcaagctcctgaccttgggtgatctgcccaccttggcctcccaaagtgctgggattacaggcatgagccactgtgcccagcccaaatttcagcttttattagtaacaattttaggacactaaacattttgtgatttttataggtttttgttggtgttgttgtttttgagacagagtctcttctgttgctcaggctggagtgcagcagccctatcttggctcactgcaaactccgcctcttgggttcaagcgattctcctccctcagcctcctgagtagctgggattacaggtgcccaccatcacgcccagctaatttttgtattttttttagtagagacggggtttcaccatgttggccaggttggtctcaaactcctgacctcaggtgatctgcccgcctcggcctcccaaagtgctgggattacaggcgtgagccactgcgcccggctagatttttatagttattattgtgtacttgttctttgtcctcccattggtcttaaagctctttgaagcagatctttttctttctcagctctgcatctctgtatctcccaaagtacctaatgcagttaagcttcctttatccaaaatgcttgggaccaaacatgtttcagatttcaggtttgggttttttttttttaaatatttgcatatataatgagacatcttggggatggaacccaagtctaaacacagaattcatttatgtttcatacataccttatacacataaccggaaggtgatcttatttttcccttggggacactgaataaactgcatctgtgtgttgactgcattaggtcaggtgtggaattttccacttatggcaccatttcaacacgtaaaaagtttccgatcttagagcattttggatttcagattttcagattagagatgctcaacctgtatatgcttaggaaatacttaaagagttaatactcaagtcacaggcagtgtaggtcaagaagtcccaaaggaatgtctaccttcattacactcatcagcatgcttgctccccatctcctccttctttggggtagtgccttcattccctggcttcctggtgatatcatcccttcttaaggccccagaccagaaaaatgggtctgggtgtccaactctcaagtccagcagactatacttacactcagcctggactatatccagaacagcccagatagttcttcctgttgttaattacaattttttttttttaattttttttttattgataattcttgggtgtttctcacagagggggatttggcagggtcatgggacaacagtggagggaaggtcagcagataaacaagtgaacaaaggtctctggttttcctaggcagaggaccctgcggccttccgcagtgtttgtgtccctgattacttgagattagggagtggtgatgactcttaacgagcatgctgccttcaagcatctgtttaacaaagcacatcttgcaccgcccttaatccatttaaccctgagtggacacagcacatgtttcagagagcacagggttgggggtaaggtcacagatcaacaggatcccaaggcagaggaatttttcttagtgcagaacaaaatgaaaagtctcccatgtctacttctttctacacagacacggcaaccatccgatttctcaatcttttccccacctttcccgcctttctattccacaaagccgccattgtcatcctggcccgttctcaatgagctgttgggcacacctcccagacggggtggtggccgggcagaggggctcctcacttcccagtaggggcggccgggcagaggcgcccctcacctcccggacggggcggctggccgggcggggggnnnnnnnnnnnnnnnnnnnnnnnnnnnnnnnnnnnnnnnnnnnnnnnnnnnnnnnnnnnnnnnnnnnnnnnnnnnnnnnnnnnnnnnnnnnnnnnnnnnnnnnnnnnnnnnnnnnnnnnnnnnnnnnnnnnnnnnnnnnnnnnnnnnnnnnnnnnnnnnnnnnnnnnnnnnnnnnnnnnnnnnnnnnnnnnnnnnnnnnnnnnnnnnnnnnnnnnnnnnnnnnnnnnnnnnnnnnnnnnnnnnnnnnnnnnnnnnnnnnnnnnnnnnnnnnnnnnnnnnnnnnnnnnnnnnnnnnnnnnnnnnnnnnnnnnnnnnnnnnnnnnnnnnnnnnnnnnnnnnnnnnnnnnnnnnnnnnnnnnnnnnnnnnnnnnnnnnnnnnnnnnnnnnnnnnnnnnnnnnnnnnnnnnnnnnnnnnnnnnnnnnnnnnnnnnnnnnnnnnnnnnnnnnnnnnnnnnnnnnnnnnnnnnnnnnnnnnnnnnnnnnnnnnnnnnnnnnnnnnnnnnnnnnnnnnnnnnnnnnnnnnnnnnnnnnnnnnnnnnnnnnnnnnnnnnnnnnnnnnnnnnnnnnnnnnnnnnnnnnnnnnnnnnnnnnnnnnnnnnnnnnnnnnnnnnnnnnnnnnnnnnnnnnnnnnnnnnnnnnnngctggccaggcggggggctgacccccccacctccctcccggtaggcacggctggccgggcgggggggctgaccgcccacctccctcccggttggggcggctggccgggcggggggctgaccccccccccacctccctcccggacggggtggctgccgggcggagacgctcctcacttcccagatggggtggctgccgggcggagaggctcctcacttctcagacggggcagctgccaggcggaggggctcctcacttctcagacggggtggttgccaggcagagggtctcctcacttctcagacggggtggccgggcagagacgctcctcacctcccagacggggtctcggccgggcagaggcgctcctcacatcccagatggggcggcggggcagaggcgctccccacatctcagacgatgggcggccgggcagagacgctcctcacttcctagatgtgatggcggctgggaagaggcgctcctcacttcctagatgggatggcggccgggcggagacgctcctcactttccagactgggcagccaggcagaggggctcctcacatcccagacgatgggcggccaggcagagacactcctcacttcccagacggggtggcggccgggcagaggctgcaatctcggcactttgggaggccaaggcaggcggctgctccttgccctcgggccccgcggggcccgtccgctcctccagccgctgcctcccgggcggccgttaattacaattttaagagcagatttctgagccatatttctgactgtgccaaataaatgaaattccttttgaatgtaatgctgtcctctagcagcagtgggtaggaaggatagggaaatggtacctggagatgatagtactgtgctcttattattattagattgttatgagattcggtttttagacattgaaacagagatgacacagaggttgaagatcccagctgcccagggtttcccccactgctttataaagatactgcctggctgggctcagtggctcccacctgtaatcccagcactttgggaggccgaggcgggcagatcacctgaggtcaggagtttgagaccagcctgggcaacatggtgaaaccctgtctctactaaaaatacaaaaattagctgggtgtggtggcgtgtgcctgtatttccagctactctggaggctgagacaggagaattacttgtaccggggaggcgaaggttgcagtgagccaatattgtgccactgcactccagcctgggtgaccgagggagattctgtctccaaaaaaataaaaaaataaaaagatgcctcctggtgagctgggaattctgcagtgtctgagttaagagtagcggtatggccgggcacggtggctcacgctgtaatcccagcactttgggaggctgaggcgagcagatcacgaggtcaggagttcgaaaccagcctgtccagcatggcaaaaccctgtctctactaaatatacaaaaattagccaggcgtggtggcatgctcctgtaatcccagctactcaggaggctgaggcaggagaatcacttgaaccctggaggtggaggttgcagtgagccgagatcgcaccactgcactcctgcctgggcgacagagcgagactccatctcaaaaaaaaaaaaaaaaaaacagtagaggtttgtctgcagccccagatggtggcctccctggggtcccatcatgttggagcccaagtccagtccccattttgccccctgtgacagactttgaaacaatttgatgtgttacataaatactctatatttttaaatctcgaattattgcaagtctatgcaaattttcaatttcaaataaatttttctgttacctgaatgttttacatatgcattatgtttatgttagttttctagaagtcagcagagttctctgagttataatgagatgataaatataaacggtgttttattagctataaatgcgtatcacttaaatgctgtctggtaagccaatccaggataaacttgttaacatcttgggtacagttgtcaggatttatcagagaatgctatgaatataatatctaaattttggcaaggcatttggtgaagtctgtcataagttcttgtagataaaacttcatggacagaatgatacaattaagaggattcataagtgggggatgactcaaaccgaagagggctagttaatgaattagtgagagcctggaagagcgtttgaggcaagggccagcagggagcctgctcaccaaaggcctccaccctccagcttgcccacatttttagtaattatttgattttgggcatttaggcattcctgtgaaattgaagtttgccaactactttgtatgcgtttttgagatagggtctcactttgtcgcccaggctggaatgcagtgtcagcatcctggctcactgcatcctcaacctcctgggctcaagtgatcccccacccagctgactttttattttttgtagaaatagattttcacagtgttgtccaggctggtctcaaactcctgggctcaagcagtcctcccaccttgggctcccaaaatgttgggattacaggcatgagccaccacgcccagctggtttacccaatttctattagatgatgaacatgtgtgaagaactgggtgctgggaggtacccgagactcctaccctagtccgcaccctcattccctagtcctgccagttttatcccttcagtgtttttttttctttcttttttgcctttttaaatgatcaccttggcttcagaccttcagcgtttcttaaacccaccttctcctgattccttctgaacttaaggccctcgtcatttatttctctcctggactacggtgcagtagtgttgtaactggtctccctgcctctaatattgcctcctcaacgataagagcacttcagtgaaaatgggcccctgaccttactgcttaaaataaccccccagtggcattccgttgcatacagaactagctgcttcacattgtctaggaggctttctgtactctagccacatttcttccctagcctcatctcctgccctttcccacctcaaattttatgctccagtgttatgggatggcctgtagttccccacatggtccgttctgtttcatgcctttgttgagcctttgctcagctggttcccctgcctttggtggtgctaacacattgtcacctgtcttcctctttgaggcctaggttatcatttgtaccactatattggaattatgtgttcatgcatttctctttctcaaactagactgactataaactccttaagggcagtgatcttatttagctcctagcacatagtaagcaggcaataagtttttggtttttttatttttttaatcagaactgagaatatgaaaagatctcggcaaatgaaaggtagaccataaaacttaacaggaggataaaatttaacagggatatacttgggcttaaaataaacaaagaaaacacatcttggcttaagtactgagtacaaagtgggagaaagatgactcaccaccatcagtagaccacgtcaaaaaagaagggctgtggtttcagttgactttgtgctccatatgagtcaacagtgtgatgcaactccagttcagaacagagaaagtaatagtcctgcgggtcaaaccatgcaggagatttgtgatccagcctattggccatcctttaagagagggtgaggcatgtccacaggaaagcagctagaataatgagagacagtgaccccatcatttgaggaaggaagtaggaatgtttcatctggagaagacagaggggacacaagaattgtaatcaaatgtctaaagagctgtcattgggagcctcaaaatgtagcattaggccagtgagtagaaacacaaaaagaactttttgacaattagatctactaacaatggaataagctgtctcatgagctccagggtactgtagggttcaaccaagagcttctgggaaagggtgttacagaggggagcttcacccctgaaggaagtttatactagatgtcctcttctcatggtcagctttgaggctcggtgataagaggtcactgagttcgtatttattgaatgttgaggaggggtgccaggaacgcattttctaatagtaatgcctttgtgcccctgttggaaaaattatacattacctaaatggaaattgttgtggactagaagtctgaaccttagagggccactcacttatgacagtgtttgaaatctgcttatgggagacatctgatggcctcacgcagtggattcagtcttcattctttcatgtccttttgtggaaatttaaagtgattatctctttcccttttgctttttttgcttcttagttctggagagtcttggcttctgggaggaagtcagagggattatctcaggatcagagctgataacgggattcccttgggccttcaaggtgccaggcctgccccagtacctccagagcctcaccagactagccattgctgcagtgtgggccgcggcagccaagagtggagagcgggagacgaatgtccccatctctttctctcagctgttagaatctgccttccctgaagtgcgctcactaacactggaagccctcttggaaaagttcttagcagcagcctctggacttggagagaagggcgtgccacccttgctgtgcaacatgggagagaagttcttattgttggccatgaaggaaaatcacccagaatgcttctgcaaggtaaagtctccaacgtactgactggccctttacactccccacattcttttgtgagccactggaatggtaggatcatgaaggcaagattgggtttaggctctccaggggcaataggaagtagattcggcagccagtggataaggactctctttttatggtggttggcatggcgtcatacctggtagggcaccaagaaaagcttttgatgataggagtattgatggcagagattaaccaaagacagagcaaaccactttgggatgtttaggaaacagatcattaaaaattcactgtagagtgtgtcagaggtagtctttgctgacatggctatttcagggcagttggccacctgggaagcataatcaaaaggaaagggcactggcctaaaatcagggcatctggctcccatcccaagtcactagaggccctctggttagtcattgcatcactctgcctcagtctcccaaaggtattatgggggaaataagaagtcagtgggagccttttgaaaggtagacctcttgttgatacaattgattatcatgtaacatctagagacatctccctgagtatttatttctcttttttgtgtgcggatttggcttacacagatactgaaaattctccactgcatggaccctggtgagtggcttccccagacggagcactgtgtccatctgaccccaaaggagttcttgatctggacgatggatattgcttccaatgaaaggtttgcccccaaaacctcctgtgcaaccttggtaagatgtatggtcccatcagtcattatgtaatgaacttgcacacaatcctgccctcaggtctcaggtcctgtatttcattctaaacctcagcctaagagttctaaactcaagcaatagaatgatgtcagtgatttgcattaataaccaaaaggtaattgcttccggaggcatttttgtaaccaggaggtagagattttcagtattcacctctgcatggattacagactatctgcaaaaaccggtgtatgaaatatgtctgattgtaattttgtgttgtttttttgtttgtttatttttctagatctgaaattcagagtgtagctctgagacttgcttccaaagtcatttcccaccacatgcagacatgtgtggaggtaaggctggttctgatcttgttccgggacctaggattttttgttctcatttactcagaagatgtcagtaaaagtgaacagtcttagcaggcagaacccctgtgatatgtgtatgtaacatctacagaaatattgttcgtgctggtttttcaattcgagtataacttcaaaagacttctttggacaccacctttcttttctcttgttttaggattttttttttttttttttttttttttttgagatggagttttgctcttgttgcccaggctggagtgcagtggcacgatctcggctcactgctacctttgcctcccaggttcaagcgattcttctccagcctcagcctcctgagtagctgggattacaggcttgtgccagcacgcccggctaattttttgtatttttagtagaggcggggtttcaccatgttgtccaggctggtctcgaactcctgacctcaggtgatccacccgcctcggcctcccaaagtgctgagattacagatgtgggccactgcgcccagcctgttttaggcatttttttaattagagttcaaagggataacagaaccttccccccaaaacacatatgcccaaaccccttgttttttccccatttctctagctggactctttatttaaagaggagtaagcatgtcaattccaaaagtatttaggattgcaacctagtgaactaagtatgcaaatacatcgctaaggcttaaatattcccccagaacatggcccagctggctctggatggaggcccagatgcgccccacctgttttacatgtcctttggtagtgaaatagaaccgaagtaagaaaaacagcttcctgggaagatgtcttaagacaaatacatgctacttaggtgcatacaagatagcaccctcacagaatcacaagtagaaggcagccaataccacaggaaaattacctgaagatccagattccacacagccacactgatggtggtggcataacattgtggaccctgagcccttacaataaacctagcactgctgtgtaggtactgaagatacagagatgaacagagactagagctatagtctaatgagagaaagttagataattacattaaatgctctagtaacaaggtgtgccagggccgtgggaacccagaggagggagtgagagttcagaggctgaagaagacttcatagaggagatcatgaagttcagagagcatgaggctgggcagagataaaaccaagggtaagaattaacaagcaggtccaatttccttagatctgtcactcaaaggcaagccagggagccaaacgtaggaggtcactaggagctaaaaaagcccccagaaaagtcaggtggggtggagggagtataggaatggagatgatttgctaaaaactatagcccaggaaggggaaaaaaaaaaacggccagacatggtggttcacacctgtaatcccagcactttaggaggtcaaggcaggcagatcacctaaggtcgggaatttgagactagcctgaccaacagtgaaactccatctctaccaagaaatacaaaaattagacgggtgtggtggtgggcgcctgtaatcccagctactcgggaggctgaggcagaattgcttgaacccaggaggcagagattgcagtgatctgagatcatgccactgcactccagcctgagcaacagagcaagaccctgtctcaaaaaaaaaaaaaaaacaaaaacaaaaaaaaaacaccagggccgggcacggtagctcacacctgtaatcctagcactttgggaggctgaggcgggcggatcaccttgaggtcaggagtttgagaccaacctggccaacatggcaaaaccccagctctactaaaaattataaaaattagccagatgtggtggtatgcgcccgtaatcccagctgctcaggaagctgaggcaggaggatcgcttgaacccaggaggtggaggctgcagtgagccgagattgtctcactgtactccagcctgggcaacagagcaagactccatctcaaaaaaagcaaacaaacaaacaaacaaaaaaacaccaagttctaagaagtcaccaggcagcctaacaagcctgccaaggcattattcttatctaaagctgtttttaaccagttgttatgtccactacatgaataaagtgatatttaatgaaaattgggagttttccagggagaaaaaaattaacagaactggagagaaataaataaaagacgctcctggggaaacatgagtttcttggtgcgttgggaattagcatcttcctcaaggtctaaaatactcatcatgttagttgcgtagatgcccatagatgatcaaaggaatcattagttacattttgaacatttaaagaggttcagttgatagaagtaaagtacatctggaacaacagtccctgttctagaaaaagtgaaagaacggagtttaaatgatgaaaacaatccagatgtttatcaactgatgaatgagtaagcaaaatgtaatgtatccatacaatggaatattatttggccacaaaattgagtgaagtacagatacatcctacggcatgggtgaaccttgaaaacattatgctaagtaaaagaacctagtcataaaagactacatattatctgattccatttataggaaatttccacttaaaggaaatgtccagaattggcaaactgatagagacagaaagtagattagtgcttagtcagggctggggagatgggaggatagggaagtgatagataaagggtgcagagtttctctttgtgatgatgaaaatgttctgaaattgaccgtggtggtgattgcacatatctgtgaatataccagagttcactgcattggccactttaaatgagtgaattctatggtatgtaaactgtatctcagtaaaactgttactattaaaaacaaggagctgaaggttgagttgatcaccgatgtccaatgatttaaatcaatcatgctgttgcaatgaagcttccttaaaaaccctgaagaatgaaaagttcagagagcttctgggtggtgaacaagatgtactcatgtgccaggagagtggcacaccccaaagctccatagggagaggaagtcctgtgcttgggatccttctggacctctccctgtgtatctgtcttttcatctgtctcttcatctagattctcatctttgtaataaactgagaatctagttttctaaaaaataaaaacaacactgctttgtttaaacaatagtgttagatgctgctttatttatttatttagagatggagtctcattctgtctcccaggctggagtgcagtggcatgatcttggctcactgcagcctccgccccctggcttcaagcagttcccatgcctcagcctcctgagtagctgggattacaggcacgcgccaccatgtccagctaatttttgtgtattagtagagacagggtttcaccatgttggcctggctggtcctgaacgcctgacctcaggtgatccacctgccttggcctcccaaagtgctgggattatagccgtgagccactgtgcccggcctgtgattctgttttaaatgttgtaatagaaacataaatactgtggcttaaatcagatagaaacagtccaaagccaatgtatcttgacagtgttgagtcaccaggttctcatactttgttgttctgctgtcctaaacacatagtttctatcttagggtcccacctgtttgctccagcttccaccatcttgtccttgtttagccagcaggaaggggaaacccaagaaataaagatcatgggcatttcctaaggcatgacttgaaagtgcacagatactacttctagtgtcatcccagtcttcagaacttaatcacctgttactcccaaaagcaagagagactgggacatgtagtctctagctgggtgcccatgggcccagccaagaatctggggttcttttactataggaggggcatctggttattggtgacaataagttgttatttgctggacagtctttccccacaagtttggtctttaccagaccaaatgtatgccagtgttctcataacctgatttgcatccaaaaagactaaaggaaggccgggagcagtggctcatgtctgtaatgccagcactttgggaggccgaggcaagttgatcacttgaggccaggagtttgagaccagcctgaccaacatggcgaaaccctgtctaattttgctaaatacaaaaattagccaggtgtggtggcacacacctgtactttcagctactcggaaggctgaagcaagagaatcactttaacccaggaggcagaggttgcagtgagccaagatcgcaccattgcactccagcctgggcaacagagcaagaccttgcctcaaaccaaaaaaaaagactaaaggaacttgttgtctagtcatagtgactccatcttaccgaaagacaagtcagattttcttccttgggcatatttctctctagttggaatcgaaaagcaactaaaaaacaactttcttcccattgagctaagagctaatctacaggcccagtttggtgtaggtcacccctaattctgtgtcagcccttgttgcatcttctgaactactgataggtacattttgtgcttttagaacagggaattgatagctgctgagctgaagcagtgggttcagctggtcatcttgtcatgtgaagaccatcttcctacagagtctaggctggccgtcgttgaagtcctcaccagtactacaccacttttcctcaccaacccccatcctattcttggtaagtgcgccgagacggaagtctgttgtaccaaactcacttaaaatatgaatagatattcttgcctaaaaaaagggaaggtgaaagatggcaacatgacacctgcctttatgtctttcagttatattcctaccgtcttagttcatgctctaatcattttcacgaacacactctttttttttgagacggagtttcactcttgtcacccaggctggagtgcagtggtacgatctcggcttagtgcaacctccacctcctggtttcaagcaatcctcctgcctcagtctcctgagtagccatcaccaaacccagctaatttttgtatttttagtagagatgagttttcaccatattggccaggctggtctcgaactcttgacctcaggtgatccacccacctcagcctcccaaagtactgggattacaggtgtgagccaccactcccagaccaccaacacactcttaaccagcctcttgtttttcagccttacccctaaacttttttctacaaagagcctctttatgaaatgcaagtctgataatttcagtccactatttaaaacctttgagtgggttcccactgctttcagtataaagcctaaacaccctttagcacggctcataaggcccttccttttctgtcccctagcccactcctcctgccttatcatccaccactccctaacacgggccctatgtgtcatcagtagggaacagttctctaaattaaacaaaccactgcttgactgacttctatttgtctttcaaaacagcctaactgtcccctcttctgggaggcctattgcaataatctaggtgagaaatgaatggatgagtgtgaagctgtggcagcaaggaagagagaacaggctcaaaagatttaggaagtagaatcaacaggacttggtggtattgaggttgatatagaggaaaattcaagaatgacttctaggcttctggctaaagtgactggataggctgctggttgcattcagtgatttttaagttgaaggtatctgtattagtctgttctcacactgctataaagaactacctgagccaggcacagtggctcacgtctgtaatcccagcacattaggaggctgaggcgggtggatcacctaaggtcgggagttcgagaccagcctgaccaacatggagaaaccctgtctctactaaaaatacaaaaattagccaggcttggtggcacatgcctgtaatcccagctattcaggagaattgcttgaacccgggaggcagaggttacggtgagccgagatcacgccattgcactccagtctgggcaaggagcaaaactccatctcaaaaaaaaaaaaaaactacctgagactgggtaatttatgaagaaaagaggtttaattgactcacagttccatagtcttaacaggaagcatggctgggaggcctcaggaaacttaacaattatggcagaaggtaaaggggaagcaaacaccttcttcacatggtggcaggagagagagagagcaggaagaagtgccacacactttaaaaccatcagatctcataagaactcactcactgtcatgagaatagcaagggggaaatctgcctacatgatccaatcacctcccaccaggccccgcctccaattcaacatgagatttgggtggggacacaagtccagatcatatcattttgccccaggcccctcctgaatctcatgtccttctcacattgcaaaatacaattatcccttctcaacagtcctccaggttcagctcatttcagcatcagctcaaaagtccacagtccaaagtcttatctgagccagggtaactcccttccacccatgagcctgtaaaatcaaaaacaagttagctacttccaagatacaatgggggtacaggtggtgggtaaatgctcccattccaaatgggagagattggccaaagcaaagggtctacgggccccatgcaagttcaaaacccagcagggcagtcattaaatcttaaagctttaaaataaattcctttgactccatgtctcacatccagggcatgctgatgcagggagtgggctcccaaaggccttgtgcagctctgcccctgtggctttacagggtacagcccttgcagctgctttcacagggtggtgttgagtgcctgcggcttttccaggcacacagtgcaagctgtcggtggacctaccattctggggtctggaggacggtggtcctcttctcgcagctccactaggtagtgccccagtgggaactctgtgtgagggctctaaccccacatttccccgtctatattgccctaatagaggttctccatgagggccccactcctgcagcagacttctgcctggacatctgggtgttttcatcatccctctgaactttaggcagaggttcccaaacctcaactcttgccttttgcacacccacaggcccaacaccacatgaaagccaccaaggcttggggcttgcaccctctgaagcaatggcccgagctgtaccttggccccttttagtcacagctggagctagagcagctgggacacagcgtgctgtgtcctgaggctgcacagagcagctgggccctgggcctggcctaagaaaccattttttcttcctaggcctcctggcctttggtgggaggggctgctgtgaaggtctctgaaatgccctggagacattttccccatcatcttggctgttaacattcggtttctctttttttttgagatggagtttcactcttgttttccaggctgcagtgcaatggcacgatcttggctcactgcaacctctacttcctgggtttgagcgattctcctgcctcagcctcctcagtagctgggattacaggtgcccaccaccatgcctggctaatttttgtacttttagtagagacagggtttcaccatgttggccaggctggtcttgaattcctgacctcaggcaatccacccatctcagcctcccaaagtgctgggattataggcatgagccactgcacctagccttggctcctctttacttatgcaaattctgcagcaggcttgaatttcttcccagaaaatgggtttttcttttgtaccacatggccaggctccatgctctgcttcactttcttttaaatgtaagttccagtttcagataatctctttgttcatgcatatgagtgtatacttttagaaacagccaggtcacatcttgaatgctttgctgcttacaaattttttctgccggataccctcagtcatctctctcaagttcaaagttccacagatctctagggcaggggcaaaatgccaccaatctctttgctaaagcagagcaagagtgaccttacttcagttcccaataagttcctcatctgcatctgagagcacctcagtctggacttcattgcccatatcactgtcagcattttgatcaaaaccattcaacaagtctataggaagttccaaactttcccacatcttcctgtctttttctgagccctccaaactgtttcaacctctgcccattacccggttccaaagttgcttccacattttcaggtggaaatgtctttatagcagtgctccacttccagtaccaattttctgtattggtccattctcacactcctatatagaactatctgagactgggtaattcatcaagaaaagaggtttaattggctcacagttccatgggcttaacaggaagcatggctgggaggccttaggaaacttacaatcatggcagaaggcaaaggggaagcaaggcacagcttcccatggcagagcaggagagtcagagagcagggagaagtgccacacacttttaaaccatcagatcttgtgagaattcactcactatcatgagaacagcaaggaggaaatctgccttcaggattcactcacctcccaccatccactccaattcaacatgagatttgtgaatccaaaccatattagtatctttgggacgtaaaggtggagatattttgaaattaaatggatgtacagatcttatctggtttccagcatgttgtacacgtccatgtctctcctcactgctactccgtgtgtcaagagtaataggaaagggcagcatgtcaatgatgtataagaaaaccaagcttgagaatatcctaaggaattgaaaagcatagttctttttttaaaattttttaaattgtgtcattttgttttttgttttgcttttaagcatagggtttaataaaaggaaaccccaggttctacagctgtgcttcaaccccaaccctgccctctcctgccatgtttaatcccgtattaacatgctatgattctcttctcacctattagtagaattatatttttgtgtacctcttccatgcccagccctcaagaatcagacatggtcactgcctccaaggagctttcagtatagttgtggagaaaggatttacagaataaaggaaggaattgttttttagatagtgagatccaaattttaaatgttgtaggagttcagaccaataaagggtctcctgtccctgtatctctctgggagacaacgttttcttcaatatggttttaacttttttcttcttagtgacttcaggcatttttcttacagccagagagacattgagaagggaccttctgtgagtgtgatttaatcatgagacccgaaggaataagagcaaagggtgacaaaccttagtcaagcttctccagtaaagttaataccattttgcagcacattttctgggtgactttaactactcaaaccctagcttataacaggtaaaatgtgtgtggaataacctggaattcttttgtgaaatttggtcctgtgcctacaagaacatgagaaataggtgcagtgactcatgcctataatcctagcactttgggaggacgaggcaggaagatcacttgaccccaggagttcgagaccagcttgggcaacacagcaagatcttttgtctacaaataataaaaaaattagccagatgtggtggtgtacacctgtagttccagctactcaggaggctaaggcaggagaattccttgaacctgggaggtcgagcctgcagtgtgagccattgtgccactgcactccagcctgagcaacatagtgagaccccatctcaatgaaaaaggtactgaataggtagaagcaaaggacataaaagtgcatgagaggccaggcgtggtggctcatgcctgtaatcccagcactttgggaggctgaggagggtgggtctacctgaggtcaggagtttgagcctgaccaacatggtgaaaacctgtccctactaaaaatacaaaattagccgggtgtggtggtgcatacctataatcccagctacccgggaggctcaggcaggagaatcacttgaacctgggaggtggaggttgcggtgagccaagattgccccattgcactccagcctgggcaacaagagtgaaacttcatctcaaaaaaaaaaaaaaaaaagaagtacatgagaaaagtcaagggcacagcaaagtcatttaaggaaaaagaaaaattgaaatggactaaagagggaaggatctgaaggatataaatgatgaccatattaaagaggaaaatattaagaaaggaaggtattgaacccttacagaacaactagaaagaatggagactgaaaggctgagtaaaatttaaatcagatctgtaatgaaaagaagagaacgaaaccccaaatggagccactgttattattggtatgactaaagcatcagtgactctgaaaccaggttctccatgtacagatgaggtagaggatagacaaaggggagttcttagggaagggtagtttctccattgaaaggatggggatgctgtgtggtggtcttccatggccctccagtgataaccctccacaagcccaggcccaccccacctggactagaggtacccctttctgggaggccatgctcacctctcactttcgtcatgaattctgtgtcagttacagcagtccactctcatctttcctgttgggaatcacagccacacaattttgttcttcacaactcattgctttgtgtttttgactttatattccttttgattgctcaggacaagatactatcttttattattcattgtccgcagcagcacctagcacaggctgactagacagatcagtgtccaggagtaatggcagtcagatagtggaccccctacatacatgggacacaagctgctgcctttatcatgggtctcttttttttgttgttgttgttgttttgttttttgtttttttggtcgggagcgaggatggagtctcactctgtcgccaggctagagtgcagtggcacgatctcagttcactgcaacctctgcctctcaggttcaagcgattctcccatctcagcctcccaagtagctgggaatacaggcgcccgtcaccacgcccagctaatttttgtatttttagtagagacggggtttcaccatatgggtcaggatggtctcaatctcctgacctcgtgatccactctcctcgtcctcccaaagtgctgggattacaggcatgagccaccacacctagcctctctttttttattcttgcccccagagcataatcttgattgatgcttcactttcagaatttataggctcagacacttgaatcaacactgggctagtttctccaaagcagtcttatgcataaagttttcttctagagaatcaggactcaactaggagagcagggcagagggtctttgtcacctgggcagcatcttctggaggccttgcctagcgctggttgcctccggaaagcctacatcctcacccccaaaaaaggcatttccaaatctgctcccttaggagtctgtctttgccaatgtttgtctaacactctttctatcttaacaatacccagaaaaaaagagatagctgtaactcattcaatgctcctctcttccaccagggatttgaagcagtatttgcacctgcctgttaattgcattctaggtaattcagattccttttggtcttcttagagttgcaggatacacttgctctctggaagtgtgtccttacccttctgcagagtgaggagcaagctgttagagatgcagccacggaaaccgtgacaactgccatgtcacaagaaaatacctgccagtcaacaggtacctcgttcttatccttttgcattgtcttatcgctgcaggatagaggttggaacacttttctataatgagccagatagtatcttaggcattgttggtcatttggtctgtgtctcaactctgccatcttagtgggaaagccacaaacagtaggtaaacaaatgggcatgactgtgttccaataaaactttgcttacaaaaataggcagcttctcagatttgatctactagccgtagtttgctgacccctgctgtaggacatcctaaagaaaaattatttttaaaggtagaaatttaataaactgttaggtcttttgctggttacgttgtcatcggttttaaataatgccaagtctctattatctgtgtggttccataactcaggaatcacaaaaccatcattttgttcctgagtttttatatgtgacagaaagcgagaaatgattatgtgtacgttaagtttctctactttgtgtcctagctgctcatttgataataacatgaacccaggagggaggaggggagtggaaagaagagcaccctagctgggtagtcctgaggtcgcagccgtcgtataagcggttacagccccaggcccggggtcatgtgcatgtaatggcaaatgctacgaaagctaaaaggaactcaggctgtgggtagaaaatgggctgctggatgaaagagatgggggcagatggagtagaaataaggtcacacctctggacaagtggccatctgggagggtgcctgctttagcagactcggattctctgtgcttggggctgggtgccaggaaaggtctctggatcagcggtcccaatgagaagcaagaacactgttttgaggcaagggatcaaagctgagcaaagaagttcaccttaatagacagcagaatgagagaaaaggaggccagataagcctttgtaattgatgcaaggcccctcatcagttactgtggctggggctgcttgccaaggcaggacacaggattgtgttccctggaagcctccccagatgtgtgaaccttccaggatctgaatcctcagtcaaaatggtctgtgtacacttctctgcctatgtggaagaagctagttttggaataatctctcagtgataccgcaccagggcaggtttcgcctagatcagcttttcctctcagcaggatagcatttggaacagagctgcaagtgatatgcaagcaggctcccctcagcccccaacctgccagacttgcccaatagctaaaattctgccattggcaatttattcatttttccaattgcagcatttgcttagaaggacacacagaaagcctagtaagtgttcggtaaatatttgttggaatataatactcagtagattccgcacccagcccagcttgattttcttaagcataaaatatagatctttttctttagactgaaaagtagctgaggactgagaatcaccctgatttttttctttaatcagaagttaggcaattgattgatcagaacaatattgtcttgttttaggccaggcgcagtaatctcacgcctgtaatctcagcactttgggaggctgagatgggtggatcacttgcggtcagaagttcaagactagcctggccaatatggtgaaaccccatctctactaaaaatagaaaaattagctgggcatggtggcgggcacccgtaatcccagctactcgggaggctgaggcagaagaatctcttgaacccaggaggcataggtcgcagtgagctgagatagtgccactgtactccagcctggatgacagagcaagacttcatctcaaaaaaaaaaaaaaaaagaacaatattgtcttgttttaccatctctcaaggatatcaagtgctggtggtaacttcacattccttcagcatataaggattttgtagaatacactgctgatgttttcctctttggtgttccaagttaattacgattgaatcttgactaccttaaaagtacacgttgtttcttttgtccccaaatcggtggttgactaaatgccacagtaaaataacattattaagttgtgttaatatttaatgtcttctttgaggagttaaaattacaatgaaaaaattaaagttacttctcagttttcctcgaagaaagaaatacaacacaagagctccacacctctgagatctcccactgtcagtgagggatggatgcagacagagctctgctctcagaccgtctcctagcagcctgctggaggagcttggggaagtaggaggtgcattctgtggggtctctctggaaagggtctggagagtggagtgggcccaaaggaagggagagatgtgacacaaatgagagcagaacagtcaatgcagaaagagaagttggagccaaagccctgagttggggagaacccgggagctgattgggcagcagtgagtggacttttgtggtcagaacacaggctcaggccaggcaaggaagaggagcaggaaatgaactgagcaaggcaggggcacttgcttgtgggatggctcagtgccaaggcccgatctccttctgcaggtaatgggaagctagagagggtttaaagcaggaatgaggtgggaaggcactcagaggagactgatgttaccggagacatacttgtggaatctctggcagcagtgtgtgtgatgggccagggctggggctgagtgaggggatttgccaggcagggaaatcagctgggggctggcagcaacagtcctctccagctgctctcagtggggttgggatggagaggagaggactgatgtatgagaatactggttgggggttgggtaatctcaacatggggactgctgctgtgggaggtgggagagaagggaaagcatgaggtgacttcagagtttcaaacctgtgaggtgtccaggggaaaataacaaggcatgcctctggcactgatgtagaagtcagactgtggcattccaggaagtgaaactaccaggaaatcgggaaaggcactcagaggccacaagtcactgtgatccaggacaaagttttccttaggtcttggagagctcaacattcgaaatggagagggcaaagggagacctttatctgctgtgggaacagaataaactgtctgggttctgtcctgccttcctcagaacgcagcacagctatcctgggatctccagtgctccttaacagatctagttatcggtccccacgggcactttctggaacctgtagaataggcaagcattaaatgcagtcattcagacttcctcaccctaacatatccttttgcataattggctttaggtctagatttgattagttaatgattctagaaggcctggagaaaataatgccatggttagccggccctcctgagaacagatttcttattcaccttttttgcctgctggaatctcctgcacatgctgcagcccacacagggaagcatgaaactcacagcctgttaacaactctctccctgcaatgtccaaagcaccctcagcccttagaagtatggacatcagggagccccagctgcaggaccctctctgcccctccctccccactctgtaccaatcatggagcctgcagaagggaatggaagaaatgacatttccaggacttaagagtaaggtattgaaatttgtagctaggagaaaaaaaatttgtgggctggactccaggcaaggctctgccttcctcctttccctgctctgacttcaggccttgaaatgctcaggaaagagctctaatgctacaagagcaggagatgctcaaggctatctctgcagctccccaccctcttccaccaagcggccactcagatctgttttatataccacatcgggcatttaatgtcagatttcatttgaacaaaggcctctgtgtgggaaaaacaacctggacaatacttaactttaaatcctggcatttgcatgattcttaagttaggcagagttctggatgagagcagcaggagaggaacccatgaaggtacaaatttgtgaagctgccttcagaggaagagaagataagaaaggtatcttagaaggttagaaagaatccagtgattggggttcttccatagcctttcctacaagccagggatacctgagccttttctttttgcagagctctttcactctgatgcaagttatctggtgtggcttagctggaaatactgcagagagttagaccgaaggactccaggatgggcttaaggatggctagatcaggaggtccccaggcagaaccacatacgttccacttagcagaggcagggtgcctctgggagctggatgggccatggggacagggcaggcagggggatggctttctggacttccctcaggcttcttgcttttcctggcactggatctccccctttcttgctctttcggcttcagccactattggccacctaatttagatggcctcctcccattcctgtctccatttgtgaggctcagaaaacagtttctggccaggtgcggtggctcacgcatctaatcccagcactttgggaggctgaggtgggcagatcacctgaggtcaggagttcaagaccagcctggccaacatggtgaaaccccatttctaataaaaatacaaaaattagctgggcatagtggtgcacatctgtagtcccagttactctggagactgaggcaggagaattgcttgaacctcggaggtggaattttcgcagtaatgcagtgagccaagatcacaccactgcactccagcctaggcaacagagtgagactccctcaaaaaaaaaaaaaaaaaaaagaaaagaaaagaaaggaaaacagtttctgcttgagttgatacaggataagagaaggcactgagcaaggaattttaaggcgtgccagatttcatgcctgttgtcagtgttttggttcaagaaggatgacttcttggtagaaactttcttatgaaagaaaatatgtaagacctttaaaggggatagtgggtaggcaagcaggcagatcggctgtggctctttttcttggaatactgtctccaagtagttctggtccctctctcctagaaggccccttgcccacaaaaagtcatgtaaaacttctgctcatccttccaaatatggacatttagtgggaatgcattaaatcccatcttctcgacagcacccttgccctccaggatctccccattccctgagccgctgcagcatttggttattgtatcatcacagagcctttgctattctacgcttttatcattttccctttcctgtgctttagttctctcttcccaactagccctcatgaacttagagactgttttctattaggtacacagtgggtgctcaatttgtgttaatggattgatttttcaccatagtcaggtggcaaaagaaacatgagagtacgctttgaaataagaaagcttcagaacaagcaggcagaccctctctgctggaaccagctcaagggacagcgtttttcactgattcataccaactagggtggcagtcttgctgactcgcacactgtccgggtctggtaggctgagtttgcagcctgtagtgttgggtccctcctcactcttacctctgaagtcagggtcttggattacaggaccagaaagccagcctggggctgcagggaccatgcccctgggttatctgggagacaccaaaggagcctcctgtgcttggcatggtgacccatagagactggaataacaatggtgtttaggagggaggtggaagaggggaagtaggagcgagatgtagaaaaatgagactcagaggttagaggagggagcagtaggcaagtggcattgtgaggttgagtccaagcagccatgtagccagggcaaggcaaagaaggaaaaaaacaacatctgcacacatgtatacatgtgtgcatcatcgtcacccacacagagcccgtgagccagcatgaaaggatgaacacttctcatatgccccgacccttgagcaaacagggagggaagcctgggaggagagagatagaaaggcctgggtcactgtgacattttccagtggccctatggagtgagacagctcagtcagcaaagccccagccctgtgggacttcacactgagtcacagatgattccactcctggaacctctaaggctgcccaccagtctcagacccgcagcaggccctgtgcttttttcagttcctgccagatcacagagtcaggcactagaagggctctgcaagtactgactgcctcccccttcctcctgccttccagtaggctctttcctaatcgactcaggtatatcgccttcaaagtgccctttctgctctgtggtgccagagcctggccccagactcaatattgtagatgtaccaagtacctttttctaaagaagaatgacccaaaaaagttaagaatcactttactagaatatatcctcctacctatctccaagcctggcctaaattcctcttcagatgagttaaacttatttgcctccatcatttctttttcttcttttttttttttttgttgttgttgttgttgttgagacagagtttcactcttggcgcccaggcgagagtgcagtggtggtgcaatctcggctcactgcaacctccgcctcccgggttcaagcgattgtcctgcctcagcctcctgagtagctgggattacagacacacaccaccatggctggcttattttggtatttttagtagagatggggctactacatgttgcccaggctggtcttgaactcctgacctcaagtaatctgcccgccttggcctcccaaaatgctgggattacaggcatgagccaccgggcctggccatccatcatttatatgtgtctactttaaaattctaaattggggctaggcaccagtggcacatacctggtaaatcccggtccctccataagctccccttttccagacttctatctatttcttttgtgcgaaagctatcctcacccacaagattagattcctgtatatcttaaccctactgcccaatacactacctgtattccccatacccacacaccccacacccaacgacctatccgacaaattcgtttccggggactccattcctccccacccctccgccccctgccttccaaccgttgttattttcttactatgtgtcaannnnnnnnnnnnnnnnnnnntgggaggatcacttgagcccagaaggtcaaggctacaatgagccatgatcatgctactgcactccagcctaggtgacagagtgagaccttgtctcaaaaaaaaaaaaaaaaaaaagcacaaaaccaaaactctaaattgttttctgaccccttctcttactcctacttaagatagtctatagatttttcttactatttaagtatgagatgagaagtggtcagatcaagggtattcaatcattcacttgttcattcattcaacaaatacttagaaagtgcctgtccgccaggcttgtttcatgtgctagtccaagccaccaccatctctccccagacttctacagcctggtcttcctgcctctatttttgttcgttgcaattcaggctcacttcttcaggagtaaaacagatgatactgctcttctgctcagaactctctcttggcttcccatcttaatctgggtaaaacccagactcctaaggcaacatataaaatcctacccagtccagcccctgccgctcctcccctagccactccagccatctttggggttttccaactccagagcccattccaacctcagggcctttgcagtagctgttccctctgcttggaatattcttcccttgtcctgcatggctgactccttcatatcattccaatctcagcttcagtgtcatctgcacagggggcctgccttgacctctcagactacagtaaccacccagttatttgctatcattcaccccactggtttaattatctgcataattttatttatttgttatttgtttctctccaccggaataaaagttccaagagaggccgggcgtggtggctcacgcctgtaatcctagcactctgggaggccgaggcaagtggatcacctgaggtcaggagttcgagaccagcctggccaacatggtgaaaccccttctctactaaaaatacaaaaattagctgggcgtggtggtgcatgcctgtaatcccagctactcgggaggctgaggcaggagaatcgcttgaacccaggaggtggaggttgcagtgagctgagattgcaccacttcactccagcctgggcaaaagaacgaaactctgtcaaaaaaaaaaaaaaaaaaaaagttccaagagtgtaggatttttgtcttgtttgtttgctgctatattctcagaacttggcacataatagattctcaataagaatcactgtttgatgatcaattgaatgaatgaattgaggaatgtatctatcaaagtagttaaacccagtaagaagcttagtgtttttcagatctacctggtgggggagctgtttggattttatgttatgaaattgccctgaggtcacagcattttcttattatggcagattaaatcgcctgccttagtcctgacttcttcctagagacattaattcaaacagctgatgaggaactgatgaagcatctactaagactggccactgtagaaaatcctggactaactctgtgtctcccttgtcactccatactggatcatgcaggatggaatttcttgagcaagagtttcatccatagggacccacatgcctagcacagggccggccctgggaagtgcccagcaggtggatacttgtcagttgcttatcaggtcccaggtgagagaccagagccaaggctacatgaatcgatctggaaggcctaggggaggtggccccttcctcccagagccccgtctgctctttcccactctgagcaggccagtggggggacaggggaaggagaacctcatcacctccctcttgatgctcctgtttcattttatcccctttgatcctcacaacactgtgagatactttattatttcctccattttatttatatttttatgtttttaaaggtggggtctcatggcatcactctggctggagtactggtggctgttcacaggcacacttgtagctcactgcagtcttgaactcctgggctcaagggatcctcccacctcagcctcctgagtagctgggattatagggacctactatacttcctccattttaaatgtgaatatgcagaagttcagagagttgaaggaatgggcccaacgtcccaaggcagataagtgtcagagccagagttggagctccggcccctgtggtgacagaggccttgcactctcagatcctctctgagacagggaaaggagtccaaacctggcatctagtttagaacccaggagttaagagaaaggggtgcattgaaggtcttctaaactcactgttgtgtttgaaagaagacactggagtcagagtgtaagaaaatgggttggggaccagagctgagataccagagtgtgccctggggaaagggaatagagggcagatgcagcaagaggcggcaggtggtcctctgtcaaggctgctgctgttcctgttctccagtgcccctcctaaagggagggaatcccaggactcgagggttttagagcctctgacttacagatgtggaaactgaagcccaagaaaggtaaatgatttccccagtgtcacataatgagtagaaaaacgaggtctacaacacccactcctgaggcccaggacagtacctctctactgtcccccaagccttgatttatacagaggaaatgacagaaatgtagggatgccccctgagaataatccagactcgggtagagaggagctggcaggggtgagatggggtggtgtggggtaagggcagagaagatggaacactgccttgagaagagggcttggaggaactccagcaacactggggtgggaagaactaagtgttctgtgaaaccagccatctctcagcagtcagcaatcaaaccacaccctgagtcagcccgggattccactgccttggtctctctgggcctctctccgtagctggctgtgtgttcttcagtattgtcagtggggctgcaggggaggaaacagaagaggctaggaattgtggtcctaacccactgtgaaccagtggagggtgaggggaaatgcttttgaaggaagatagttatgtgggagccagttatctgttttcttatttattccttcaaaataaagagatttgatcaaggtaggcccccattcctgccagctgcagtgggtgggcacggtggagctccggttgccgcattccaagttgcgtgtgccatcagttgctgttccagagagcctgggccccctgacgttcacctgcatctcagcgagtgcgtcactggcagcggctcccatgatgtgcaaaagcaggtgcaaactaatgctcccgtcttcgatctgctggccagttatgagtgccagtgagtaccctggctgggcctggttgctggggtgatgggattgttaccatggcctcccagtgactaatccccagagagacaacaacaggctcctttcgaggaaatgagggtcatttttgcatcattttgccctgactcttgctgcttctgaaagccgagctctctggccaaggcgactgacccctgtgggtgatgataagccctcagtctgaggcttaggccatctggtgctgacgcggctgcagggtgttgtcttccctgttagtcagggcaagcctggtgcctggtgatcttccttctccagctcgtggcctcggctctcctcttctgtgctttccttttcctcaggaactttcgctttcctcagcaaggccatatcacaatgcaggatttctcttcactgtggtgagcaggcttcctttttgaacctaagccagtttcaggtgttagggtcactactctgtcaggggtggcaagatgggcccccccacctttctcgttcgtccctggttcagtgaggatgactcctccagccccagcttcaggcctgactctattgggagcatccctcctgagcaccccagccagcactggcacctgccctttgccctcctgagttcactcagccacagacttcttccatcccaacagccagatgaaggtcagacccaggctgtcatgacagtgctgcccgagaagttctgcagggcaggggtggggcccaggagaggcctcttcactggccacggtggcgacccctccctcaccatcctgctgttatccaaggaggcgtaaagggtgacatcagagacctgggaagccctcatcctacccaccaaactccaattctgttctcaaatctcccagaagatgcttggtggattgtgaaagcctgggcttccttgtttttgctgctctattttgactacagcagtccccatggcaagacctctcatgggcagaagagcagaatggagagtggctctggtggtggcgggccagtacagggagggtttttctctgcacacgtggggcagggtgtgtacattgagatagaatggcatgttgggaatctgtgcacctttcagagtgtctgtttgtaaagagtacacagccccagtttggatgtgaatgtctgtatgagcgttaggaggagaatgggattcaagagatgtgctctgacctgttcactgatgcatcatgatgagctaaaagtaagaaatccctccctgaatgtcaaaatggccaggaaatcgttgctgtatttcagtaattgggtttgtcagaagtgaatttcttgtgaggctgatctacaggagcagaggcagagaacagcaggtgggaatcaaaaacaaagaattggccttgacggcaacttgtcttctccctctctgcctcctcttcccttgttcctttccccctctcctgcttcctcacctccagctgaagtactgaagttactggagtacaaccagggctgtcagcttggggtgtatcttgaaatggactttctgaagtattttctggggtttcaagcatgaaacagctggtgttttagtcggggtatagatttggcatctgtaagagaagttaatagtggcttaaacaagtcagtagcttattttttcctcacacagagcactcagtagactagtgtgatggtccgtatgattaggggcgcacaccttctttcttggtgctctgacattttcaagacacaccatccctcacatggccccagatggcagtgccagctcccactgccatgtccacaatctggtgagccggaaggcaggagggaagggccagcctggaagtcacatgcaccacttccatggatcttatcagccaggccctcgtcatctgccacagatctcagccaaagaggctcagaaatcgtgtgttgagctaaatggacacacgcttagctaaaaagcccatttctgtgtaagggggaaagactgggttttgggagataggaacttcacttctcgcaatctgccatcttcttatttttaccaggtcctaatcactgaggttctggcaagtgccagctgcatgggcactaacatctggggacacagggatgaattagatagagcatctgcttctaaactgttgggagtccaccctctcaggtggtaggccacctaaaatcaacagaccttcctttacatgtatccaaatcattttttctgttagcaacttacatggctaattttataagaaaaggaagtaaccattaataataagaattttgttctaaacattctcactaacttggtaagtttgtttgctgatccctgtatcatctcttaggaccacacacatcacccaaaatgcagacacttcattaggaagcaagcccacaagctttgcagttgcattacccagagcaagaatttactagaaagatagctttttaattgaaggggactgggaaggaagaaaacacttagtagagaccaaaaaaaaggagcaatggcgggagggagggagccacacttagaagggagcaggaatggggaagtggagaggggaggctcaagtttggcaccctgcctgttccaccactgtgcttatgcgtggcatgtcctccttgtgccagtcaacctggttaagtgtcgcgattctacccagccccatgccctcctttcccacaaagcctttccagtctttgtgtctctccttgagtcagacccacactgtttagctcttacattgctcattctttaggagactcctcctttcacccacactaagctttttaagggctgaggcctccatcacagcagagtggatcatgttgttttttgttttttgtttttgagagggagtctcactttgtcgcccaggctggagtgcagtggcgctatcttggcttactgcaagctctgcctcccaggttcacaccattctcctgcctcagcctcccgagtagctgcaactacaggtgccagccaccacgcccggctaactttttatttttgtttttttgtttttagcagagacggggtttcaccgtgttagccaggatggtctggatctcctgaccttgtgatccgcccgcctcggcctcccaaagtgctgggatcacaggcgtgagccaccatgcccagcccggagcatgttacattctagagtggctcatgacaggcagacctattgtttctgtagcacagcctggttttggagttgaaagtggacatggggtttgagatgggcagcttcccttcagtcagtcccctgctcagcctcccggcaagctcactggccccagcgatgagcctgtagggtcaggttacactgggacaggttggtaagggctccccaggcaacccagtcccatcacaccagaaaatgaaattcccctcttttaaaagccactcatagaacatagtggtggttgtggtggttctgcttcagaccctcaagagtctgtgtgtgtgtgtgtgtgtgtgtgtgtgtgtgtgtgtgtgtgtgtgtgtgtgtgtgtgtgtttcaaaagtaaaaaaaaatcggattatcatcctcgcccccttaatctgttccaaatgagaacgcttaggaagaaaactcccaagaacccactctgttaagaaaattggtttctgctgtggagtgggtcagggtggggaatggagttaggaaaatatatggaaactgacagaagagattcggtttgtgtttggaaaaggattcgggttgttttcaagttttgagttacagcctgggcgtgtttgaagaagtggggttgtacagcatagcctctgtgggcttctcattcagctcctcctgcctgcccggcccttgttagagatgccttgcttggcaggcagactggctgggaaccttcttcataaataactccgtgggggatacaggagtgataacagacgttttaagtggaagcccagctgccttaagaacttaggaaagggcccggcacaagtctggccccaggattctcctcgctaagcaagggaacgctcttaaagctttcagtttggttactctaattttattatttctctaacctctctaatcagcagagtgattgaggctctgattgtgagtcctgtttttatttttcacactatttttatactttgaagctgtggttttaaaatatacactcaaaaatgttggctcggcacccacgaggcccaggaggttgtccagatgcactgggtctggggctgctcccagcagcctttcagtgcccccgcccccaccgctggcctttggggatagatggaatgggcaggagttgctgtaagagactggtccaaccacaggcaagcttctggccaaatattttaaattcgactctgagaaactagcaggaatcttgttctggtggcttcccaagcacacactcagggatcagaacctgcagaagcagaattcccagtttcagataaaatgttcattcatctccaatatgcagtgctggtccccatcgcccttccatccatgctgaaagtgtgtgcagcacggtacttagggaaaaacagtgccagcaaagtgggttcatttgtttctgtcaccaccatttgctggaaatggttgtcatgttcacggtactgtagaactcagagatgggtgcaagaaatcttccaaagcgctgaccttcctgtgttcttctccagctagttctaaccctgccctctatcctcttgccctcttttttcccccaggctcctcccttcccttcttttctcccaatccagagtagatctaggaatctgaaatttccaccttggctacaaacagcactgagtctctttgaacagccttgtccataaatcttagattgtttttcatctttgaaaaagttacttctggcccagcacggtggctcatgcctgtaatcccagcactttgggaggcagaggtgggcggatcacctgaggtcaggagttcgagaccagcttgaccaacatggagaaaccccgtctctactaaaaatacaaaattagccaggcgtggtagtgcatgcctgtaatcccagctactcgggaggctgaggcaggagaatcacttgaacccgagaggcggaggtttcggtgaactgagatggcgccattgccctttagcccgggcaacaagagcaaaacaccgtctcaaaaaaaaaaaaaagaaaagaaaaagagaaagctacttctatcagcaagtcattattcacatgtaggggcagggaaaagttcactacattcagacttcagtttcttttcactctatttcacaacatccactcccctgaaaccatgggctttaaaaaaaaaaatcagtccccaataggcaaggtgccccgtgacatagccagctagaaccagggaagaaggtgagagtaagggtaggtttgcctagatggaggctagctgtctcagcccatggaggaaaataatttcagtctcagggaactaaaaacccactgttcttattttagagtgatggatttggtgggtggggaaatttggggagacagggtgatatttataatgaaaggcttagctgtattgttgaggggtggggtgagaggagggagagcatgaggaaaatagctaatgcatgctgggcttaatatctaggtgatgggttaataggtgcagcaaaccaccatggcacacatttacctttgtaacaaacctgcacttcctgcacatgtaccctggaacttaaaaataaataagtattatagtgtaatatagctaacaggctagaacatacctcagttccatgttgcatcagctaaaggagagatgaaaggagggtgaatttggagcaaatagaagagaaaggaatgtggggagagagaaacagactgtcacttgaggacctggcttggtgtttctgcttctcatccttagcatgttggctctttgaccccgtgcttgtcctcatggttacaagatagcttgtatacctcggatacatcccaacattttaggtaggaaagaagggataagaacatacatttttcttctcacggggttctttttatccaggtatttaaaatgcccccccaatcacccacccacccagcatatatttctgtatgcatccttggccaggtcaggtacatggccatcccagatatgagggtaggctgaaggagaaagtatcatgcaatggagaatgagacggctctgggcatatcacttggaactggaaccatcacctcccagaacaaaattggccttctattaattagcaaggaggaagtgggatagctgttggatgggctactggggagggattagtgtatacccaggaagtgccgtgacacatttagggaactacgtgacacatttagtccagcacgaggagtgtcgagttggggtagggtgggagaaggacaaacactaaaggtagatagggaccagattttcaaaggccaaggatgccctgctgctgacttggctctctatggaagccatcacaggcgtaaggaggaaagtgggagatgattgcacattacacagaagtggggaggggacgccagtctcaagagcagtggttttcacactgcaatatgtacacagatcacctgaggatcttgtcaaaatgagattctgtttctgtgggcctaggtaaggcatgagattctacatttcgtaaaaactccccagtgatgctgacacagctgatcaggggatcatacttggagtagcaaggtcctaatgttcttcaaaaataaatgtacaaatacgtttgttagacattttatagtaactactaatataactgaaatagaaattaacactctcaaatcactaaaggaaaaaaacacgaacttagattgagttttctttttaaagaaaggcaaaatctgatgtgtcttttggtaatcctgatgtctacatgtgacagaaaagccaaacagaggtttaaacacagtggaagtttttttctctctcaagtgactgcagtccattccatatgagtgagtccagactgattggcaggccccaggccccaggccccatgcttcttctgtctttctgcttcactctcctggcatgtggcttccatcctcaaggtcacctcttcatccatgatggttgccagaagcattagctagctcatcctcataacagatgaaaagaaagggaagaaagaacaataaagagtgtgcatcctctcctttcaaggagtgcccccaaagtcccataaaacacttctctttacctctcattggctacaacctaataacatgtccatattttgctgcaagatgtgcaaagaaacataatgttttgggctaagcacattacctagagttcgcttgctaaggaagaaggaaacacatccagctctatgtcactttgataaagagataagcctaaatttacaaggaatggttgaaaataaagaaatgcacacccagcactttgagaggccgaggcgggtggatcacctgaggtcaggagttcaagaccagccttgctaacgtggcaaagccccatctctactaaaaatacaaaaaattgccaggcgcggtggctcatgcctgtaatcctagcactttgggaggccgaggcgagtggatcacctgaggccaagagttcgggaccagcctggtcaacagggtgaaaccccgtctctactaaaaatacagaaattagctgggcatggtggcatgcgcctgtaatctcagctacgtgggaggctgaagcaagagaatcgcttgaacctgggggagtggaggttgcagtgagccgagatcatgccatttcactccagcctgggcaaaaaagcaaaactccatctcaaaaaaaaaaaaaaaaaatcaaaacaatagccaggcattagtggcatgcacctgtaatcccacctacttgggaggctgaggcaggagaattgcttgaaccagggaggcagaggttgcagtgagccaagatcgtgccattgcagtccagcctgggcgacagagcagcagtccagcctgggcgacagagcaagactctgtctcaaacaaaaaaaagcacaaaccaggcaacatggcgaaaccccatctctactaaaaatacaaaaattagctgggcatgatggtgcatgcctgtagtcccagctactcaggaagctgaggtgggagaattgcttgaacccaggaggtggaagttgcagtgagccgagattggaccactgcactccagcctgggtgacacagcaagacctcttctcaaaaaaaaaaaaaaaaaaaaaaaaagaaatgcacaaatttatttcaggcaattggtaacagaaagaaagcaggagtggcaataataatattaggcaaacaaatttaagacaaaaagtatgaagatggacaggaagagaagcattggataatgataaaagttatccacaaaataacaggcatgagcctttacatatcgggtaaaataacatccaaatttaccaaaaaaaacactctacaaaatattagataaaagttattaaaatacagccatagtaggatacttttcctttctcagaatgtaaaaggtcaagccaaccaaagatgaatgaggccttaaaggatttaaataccagacttaaaagtttgtataggtataaaccttgtactctgacagaaaataaacatccatttcaaacagctacataacatttacaaaaactgatcatatttcatgttaccaaaaaaatttccatttcataaagaaatcttcctaggccacattctgaccaaattgcaagcacactagaaatataaaataaaaatataacaacataatgccacttagatatttaagcacagtcttctaaatacgttatgccaatgacaacacaaaaattaaagactccttagaggcccatacagaggaaaacacaatcaagatttcagtagatgaacctgtcttcagaggaagtacttgcattgtacctcctgggctcaagtgatcctcccacctcagcctcccaagtaggtgggacttcaggcaatatattaggcaattaagtttttatgaataatatacgaggaagtctttaaaaataggtaaatgaagacaatagaaaaagaggcaaaagataaaaaccgagcactctgtagaagaaaaaagatgtgaacaggacacgcatgaaaaaaatgctcatcctcactaataaaaaagaaataccaattagaacatcagcaccctgtcatttccctgtatcttattggcaaagaataaaaagattgttcttggccaggtgtggtggctcccacttgtgatcccacactttgagaggccgaggctggaggatcacttgagttcaggagttcgagaccagctggatgtggtggcgggcacttgtaatcccagctacttgggaggctgaggcaggagaattgcttgaacccgggaggcataggctgcagtgagctgagatcattccactgtactccagcctggacgacagagcgagactccatctcaaaagaaaaaaaagattgctgtcacctggggtgagagctgtgaaggaacaggcatgatcataccaggtggaactataaattggtacatttttagagagagtttaatggtgtctatagaaatttaaatgtgtatgccaattgagccagcaattcccttttagtaaatttatcctacaggaatatttgcacaagggccaaagatatatgtataaggtattcctttcaacagtgtttataacaggaaaaggaataacctaaatattcatcaaaggattagttaagtaaatgttaatacctccacatactatgcagcagttaaaaatggagtaaatcagtatgaacccacatgcaaaggcatccgtgatatattgttaactgaaaaaagcaagtcagaacagaacatctggagtgattccactgtcagctataataagttgttattattctctataactctgtaatctttttaagtctagaaagctccatattatgaattactgcctatagggcctctgctgcctacaggggcctggcaaggagcataaatgcgtgaactggcaggacgtgcagtcagagtaggatggactggcagggagcggacaatcatgtactatctcagttgtagccaatggttgtgattcctgaccttgccaggtttccctggccagcattcatggatcaagactcaggagcagtagctctgaatttagtagtcttgagtagtcttgagtttcagccccaagacagccttttctggccccctagcaagggcagtagtagtgacccctatcagtatcactttgggtcctcttcagcaagtgctgggtgaacctggagcttttagttgatggcagcttcactgaccccctccccttgacttggtgaaatgggctccatcatgtcactctgaaactgacagcagttgacattaagattttttttaacaccatagaacttacagactgtgtttcattttggcctggttccttagtgctccagaaggttcactttccaccacagaacctccagaatcttcaggaggcctcacacaggccaagttacccatagtcccaatgtgagccctgtgtagagttactgtttttagtccttctaacctttttggcagggggagggggccaaaacagcctcagctgtactggaggagaacagctggaaataaacagccaatggatgagaaaacttgagggtcgatatcctccagttgccaagttctatcctgcttagcaaagtctctgtgctgcttcattcttcatttctaaaagtgaccttcaacttgatttccccctggccctcagtgtaaatattggcctggtcattgaggtcgtccaaagaatgatttggtctcttgtgtaaggttgccagatttagcaaataaaaatataggacacccagttaaatgaatttcagataaataacaaataatttttatttttatttttatttattaatttattttttgagacagagtttcactcttgttgcctgggctggagtgcaatggcacgatctcggctcaccacaacctccacctcccaggctcaagcgattctcccacctcagcctcccaagtagctgggattacagggacccaccaccacacctggctaattttgtatttttagtagagacagggtttctctatgttggtcaggctggtctcaaactcccaacctcaggtgatccgcccacctcagcctcccaaagtgctgggattacaggcatgagccaccgcacctggccaacaaataatatttttttttagtataagtatgccccatgctatatttgggaatacttacactaaaaggatatttattgtttacctgaaattcagacctactcagtgtctcgcatttaatcctgcaagcctgctccgtgggccgctggggctctccctttctaagggaggcacctgaaagtgtgaggatcaagagcagtaggaggtgtcagtaataaacctaataagcactgtccagggcatgacacgtcacctcagccccagagcctgctgaatccccaactcctgcttttctgtacctccccttcctcccactggcttctctgcttctgagctgcctgcctctggactttctcttttagtctgtgactttcccctaccctcacctctcctcttttttcctcattttgctctcactgatccgtaacacgtaattaaagtttacatatttgagtgttggttgtaattactaaataaggttttatgttccttgctgtaatttaaatagcaggggaatttaactttttgtgtgtgtttcattttgcttttattgataggtggccttaaattcatttttagccatgtgaatcactgaccttcaccttgagctgagagaaaggccttccatatctggaatgaactcatgcacatcttcctagaacagatgccaacggaggaagtggggaatgggatagactgaggtggtcgagtgaagggagacatcactaggttgacctattcaagagagaaggagactcggaagcctcctgtgctgccccgaagcccagccttttggaattgggccccgctggcccgggagaagcctcctctctcctctttatgattgattgcctgactcctatgcagtgagaagcagcctgtcatagggaggcgcagggtttggggttagagacaagcgccccaggggccttgtgccttccctctctgcctctcccagtgggagcagacacttgaaggaaactccactctgtcccctcccaaaacaggtagtctggacaactttctgacgtccccctgtgttagaagcttctggttgctagttgctaccttcaaggactctgatgtctgttttctctcccattctctctgtctgcctttgtttttccatcccccctctccacccaccaacagagggacctctacctgtctaccagatgggaggcgttttcccatctgggaagaaaactttgaaggacagttgccatcttggagagagaatactgatctgggaatcagggagtcctctctatcctgagctatttggctctactctcttggcttcagtttctgtataaaatgaaggtgattttgtttgtattaaaatatgaataaaaacgaatgttggccaggtgtagtggctcgcacctataatcccagcattttgggaggctgaggtagaaggatcacttgagcccaggaggtcatgaccagcctaggcaacgtagtgagatttcatctgtacaaaaaataagaaaattaggggggcttgatggtacacacctgtggtcccagctactcaagagtctgagggaggaggatcacttgaccctgggaggttgagaccagcctgggcaacataacatactctgtctctaccaaaaaaaaaaaattatttatttatttatttatttttctttttttaattagccaggaatggtagcatgtgcctgtggttccagctacttcggaggctgaggtaggaggatcacttgagcccactaggaggtcgaggctgcagtgagccgtgatcatgcccctgcacttcattcagcctggaagacagactcaaaaaaataaataaatacaatgtcaaaaagtgagcaaggttctatccccaatccaaatgctaactggtttaaaaaaaaaaaaagtagaagagagacaaggtctcgctgtgctgctcaggctggtctcaaactcctgtgctcaagtgataactcccaccttggcctcccaaagtgctgggattacaggcatgagccaccgcacccagacgtaagcgggtttctgtttgttagagaagccttttcttcaccaagttaagaggaccttaccacttcattttgggaggagtgtttttattccttctatcttggattcatgaacatccaggtgttctttcttacctcttcttacaggcaggggagaatttaaaagagcctgaaagaatagttatgtgccccttgacatttcagcaaatgtttcagtagaaaggagattggctctttcaatagttcacctaatggtctgtgaccgagctgaggtgtcttcttgaccctgtaaaggaggcagctccatgagtttgagggctacacacgtcaaatggctgtagttgcccaaagaattttggatcagatctctcacctttgatgggaatgaaataacaaagcctcacccacccggggcctgttgccttttgctgagcaaagtcctgtcagccgtttagtacagacagaggcttcaccccagctggaaacccgataatgagtgaggcctaagaatctgagcttcccggggtgtgtgggaaaccaaatattagaggccacagcattccccgactccaatacttggatggagcttgtgcattcccttggttacagccatttggggctccaaaaggcgggagaggtttagccagagcctcctctcagcagttctggggggcccaatcccttgtcaccttgaagttctgtttaatccttcaccttcacagcagcaccacagcagtgaaaaacaatgaaagtcagccacacccgtggaaattcatgtcagggaaagaaggcaggaacaggatcaaagcctcttgtaacccaagaattcctcagcagctccagtcccttaataattatggtttggagatttgccagaaagcaaaaccacttagcatgccatatttaacaatgaacagttttctgtgttcataatagtcactgtgcagagcaaataggcaccttgaacaaagagtaggatatttatatgtgtatataaaataacccgcacctaccttaaacctaaatatgttttcagagaagaatgtggtacgtccctctgctctggtacctgctttatgagtaagttggagaaaagctacatactctgcccccatccccacctccccaggtttttaaaatagaaatatttgtttaacccagaatttcccaaacttactaaatagttacactctttagtttccagctggagtaaagctgctttggttggttttgaagtttggagtgttttatgttgttttaaatatctactaacattccaaaaagccagtgtccccagaaaaactttttgggaagtgatgaccaaagagtgcaggagacaaggatgtagaccagtggggggaccgagaaaacaagtcccaagccctgaggggagatgaacaagtttgctggaggcccaggtctctgcatcaggtttaaggaaccttggatccaggttctccatgtcactgtgtgttcagttagactttatccaacaaacatttgtcattgggggaaattagagaagaatggctgcttggaggaaagttcattacagccaaaccttaaaggatgggcagaatttcaagaggaaaagatgagaaagatggagaacattccagaaagacatgggtggcagagtatgaggcctgttcaggaaaggaatgttagtgtggtacaagcatcgagtgcgtgagtagggtggggtgagatgaagcgggatgacacaaacgacctttggatcaaataggattctttcagatgcaagtgacagaatgtccaatgcagcccacttcagcataagggaggcatactggatcgtgtaactgagaattccaaggctaagactggcttaagacatgacataattcaaggactcaaacagtgtcccaaggacctggtttcttgtcatttctcccttctgctcctaggttggttctgttttcgatcagctcacacttttcttggagtttaagatggctacagcagctctagcctttacatcttcatttattcaagtccaagtcctgtgtcagtacaatcccattgcattttattggctctagttggggtccaggcctatccctgatctaatctcaggggccagatgccagtgagggcatcatattcctggcctctgagattagttcagggataggcctggaacctgtctggagcgggtacccatgcctggagttgagggtagggttagccccacccaaaccacatggactaaaaggtgtggaggggctgggtctccagagggagactggggacagctatccaaaggagggcgaatggaaggtgggcagcaaaaacaacagatgtctgctaaaacctggaatgctaggccaaagaacctggatatcatttacatcagagaaccagtaaagatttttgagcaaataagcagcgtgatcagagctacacattaacattaattcagctacagtttaatagctgccatgtacttggcacatggtaggtacttaatataattatatattgaatgagtgaatgcaaaaagagagatgagtagctcaggagaggagagagaaattaaaggtgggcagcatttttaggccatcgtagcagtttggaaggggagctagcaaagggaataacgaagacccatcaagaaaaccaagaggttccattgtcatgaaacccacataaggaaaaactatcaagagggcaggtttggtcacccacgcaaacactgttgaaaggtcaggttaaggacgatgaggattgagaaaatgtcatgagtgagagttgagagagaaggttcagtagtgggaggttagagccacctttaaggagtttagaagtaagtaggaggtaggcaaagggcccaagtgttgaccactctgctacatcacctgtcttcttatcctccccaattcaaactcagcaaaaaaggtgctctttcccctgcacacatccttcacacagcaccttatacctcccccatgacctctatccagccacgattccctttcctcccaggcgtcttcaggttctccttctctacctccagtggctccttctcatacaaatatttacatcactcccctgccctaaaaccacatcttctagaccctgatctgtcttcaagccaatgtttcaaaagagtcattagagaagctttgactttgagggggacggaagtttgagcttatgctgaatgtccttgtagaagtcaagattatcaagaatgtcaagtcaagaagtcaagaatgagtggttagggagtaagatgtagagacagggaaaagattggaacagtttatatagaggatcagttaggagtcaccagaataggaagaaaagaattaccagaggacatggagattccagctgagattaaacagcgtgagtttatagacagcttcatcagcagactgccgctactcagctggaattggtggctcaaagtagaacagtagattgggtttggggagaggtggctagggaacattgttgagcctggtggcagatcagattgacaagagcactggggactaggaagatcatcacaggcctggggaatcctggataatgtagaataatagcctgggagagagggcaaggtcaaggatgtggtcaggagtagggggcgtgggtaatttcagtggaaaaggtagaaggttaaacagtcgtgttaggaatattaaagaggccatatgatgtgggagccatagtgtgtagactatgtggcttaaatcccaaatcctaaactgtgtctctctgttataccccattataaaatggggctcataaaacctactttaaaaggtcattataattaatatatatgaagtacatatgatagtgccttgcacataagtacccactaaacgttcgcaatgatactgatgttcatttcaaagtgatgataaaacttagaatttgagatcttgagttgaaacagttctaaataatgacaagttctcagatgtcatcatggttaattgggagtagagtaaaatcagagatggggagtatttgaattgaagaggttgaaaaatggtgaaagcaaatactgggagggacatctttatggatgtggaagtcccagatggggtggccatggcgcagtcattgaagaaggccaggtctgtagccagcaagaatggggagatggttagtatggacttcaaaagagagattgtggggaatggcagggggattatctaggagtggcagaaggagtttgctattccgtccaagtcagagactcagggacagaaggaacagccccgaatggaaaatcaggagaatggtagcttctgccgggaggaggaagaaacacggaaaagatgacacatatggagaatttgctcacaatatgacagattttaattgaggggaactattttttcataagagcttttgagaaaaactattccctgaacatggggacacatctgaaaaaggcatgaggataggggaggaggtaggaggttttggagtagatttctgagaaagccaacagagggaggccctgtttcctcaccatgattgtaaggtgcatgacatgagacaagctggctcaggcctgtgggctggtgctaggcatgccccagctggacacagctccctgtggccctgccacatctcccactcgggagtacacagtcccacagtaccttagattgctgtatttcccagaccggtgtttcgcacgctgacagagacaggaagcagaccaggtgagctgggattgggggcttctgcttttagagagcagagagcaacaaatgggtttaaaggagaggaaacaggacaccagcaggcttcagggctgccttctcttccaagagtgctgctctgtaatgtaattgtatttggacattttttccacatgatgtcagggtatagcctcccttaaaagccttcatgaaaaagcacaactataaaacagactcaggcagtgaaatggaaaccagacgagtggttctgtgtaatttaggtaaagagatttctctttgcagctttgtgatctgatctgatctctgctctctgcataaaactgtgtttcacaggatccacttacatttgagtcttaccatgcaggtgatttcagatgtgaaatgtcttgctttattaccagaaagcaagggttcccttcttggtggctgtgcagaccacccctctcaggctgcaacctttccagtcttcttgtccttgtgtgagcccagaccccagcaaacagggaaggaggcctgaccccttttcactcttgttttaacccctctgttcaccttcgtctgtccacccctcacctcccttcttagggttagtctttggagaatgcatcctggggagaaatactcattgaagaggcccaatccctttaaagcaaatgggcccactttcctgcccattccctttgctttaacgcctcagggacacagaattgaattacccattgtcctctgttcttgacacactatcctgctccatccccatgagggtccttttattttattttattttactgtattttattttattttattttatttttatagagaaacgatctcactatgttgcccaggctggtctcaaactcctgggtttaaggatccttcgatcttggcctcccaaagttttgggattacgggtgtgagccaccatgcccagcccctttcttttttcatgtttatatattattgagatgaaataaacataaaattaatcattttaaagtatacagttccagtagcgtttagtacttttacagtcgtgtgcagtcattaccactatctagttccagaacggtttcatcacttccctaaaaaccctgtacccattaagtagtccccactatcccctggcctctggcaactgccagtctgctttctgtctccgtgacttttcctattaagttttttcatataaatggatttatatatgaccttttgtgcttggctattttcattagacataatgtttacaaggttcatccatgctgtagcgtgaatcagcacttttagttctttttatggctgagtaatggtccattgtatggatctaccacattttatttatccattcatccattaatggatggacatttgtgttgtttccacctcttggctactgtgaatagtgctgcatgaacattcatgtataagcttttatttgggtactgctttcagttctcttgggtatgtacctaggagtggaattgtgggtcacatggtaattctttgacttattgaggaactggaggtcctttcttgatggacatcctccccaggtctgctctgacaaggaatagcaggcatgttccaacctatccccacctcccaagacactgagaattggcacaatgtcatcattctgttagatctggaaataaaccgaagaaaaaagagtatggtcaccacagagatgctggtaatcagaagaaagacagcttggatgggggtgggaaggggatggggtactgagaagattcagggtcacttgaaaagatttgactaaggcccaggaagaacttaagagaaagggactcagccacccagaatgaaggaaattgtaagcctaaaatacccatggctggtacagccaatccactagtgatgagggagggatataagagagctgtgaacttactttttcctgcaactagggggccgggaagccacgtagaaagagtctttaatgttaaggatgtaggacatttgggccttgtgggagcactgaaggcttttagactgagacataatcaggtcagagttgtcttagacaggtcaccctgaccacagggaaggggaaagcttggagtctagacaagactggaagcaaggagcctgcttagaaagctaccatcattggccggccacaacgattcacacctgtaaccccacattttgggaggccaaggtgggagcaatgcttgagcccaggagttcaagaccagcctggacaacatggcaaaaaccctgtctctacaaaaaatgcaaaattagctgggtgtagtggcgtgtgtctgtagttccagttactcaggagactgaggtgggaagatcacttgagcccaggaggttgaggctgcagtgagccatgattgcaccactgcactccacccagcctgggcaacatagttagaccccatctcaaaaaaaaaaggaaggctaccattgttctgagaggaaggatggtgaggatggaccaaggaagtggcagtggggatggagaggtgacaagtttgagaggtgtttaaaaaggggcacaattgtcagacaggttactgtgcatacagaggtgaaggcagagcatgagatgctgtggagaagaaaaagtaaagcaggaagcagcagaggagggcgcctcagagttccagagagctccagagcactgcacacactgccgagagagcccagtcagactgggcacgaggctgagagtgtggggacaggaagcctgtggaagcggcccgggccgctccttctgagtgagggctaaatatggaggagatttgtgtcctttttcttccttcaggtacaaaactttcaaaacggattccatgtgttttgatttcaatattttgacctggaggacactgtgactctatgtaaatgcaaatttctaatctgaattatatgaacattaattcatttcatcaagaaattattttccatcgtaactcctacaatccagtttaattccttaatcaattttctttactgagcgagcgtggtggctcatgcctataatcccagcactttgggaggctaaggcgggcagatctcctgaggtcaggagttcaagaccagcctggccaacatggcaaaaccccatctgtactaaaaatacaaagaaattagccaggcatggtggtgcacgcctgtaatcccagctactcaggaagctgaagtgggagaatcgcttgaacccgagaggcagaggttgcactgaaccgagatcatgccactgnnnnnnnnnnnnnnnnnnnnnnnnnnnnnnnnnnnnnnnnnnnnnnnnnnnnnnnnnnnnnnnnnnnnnnnnnnnnnnnnnnnnnnnnnnnnnnnnnnnnnnnnnnnnnnnnnnnnnnnnnnnnnnnnnnnnnnnnnnnnnnnnnnnnnnnnnnnnnnnnnnnnnnnnnnnnnnnnnnnnnnnnnnnnnnnnnnnnnnnnnnnnnnnnnnnnnnnnnnnnnnnnnnnnnnnnnnnnnnnnnnnnnnnnnnnnnnnnnnnnnnnnnnnnnnnnnnnnnnnnnnnnnnnnnnnnnnnnnnnnnnnnnnnnnnnactggggtggagcgctagagggtcccctttattttcttaaatatcaactttttttttgtttgttttgttttgctttaagatagggttttgctctgacgcccaggctggagtacagcagtgtgatcacagcttactgcagccttgaactctgaggctccagtaatcctcccgcctcagcttcccaagtagcagggaccacaggcatgtaccaccacattcagctaatttttaaattttttgtagccacaggttctcactatgttgcccaagctgggcttgaactcctgggctcaagtgatcctcccacatcagcttcccaaaatgttgggaatataggcatgagccactatgcccagcaccccccttttttttttttttttttttttttttgagacggagtcttgctctgtcgccagtctggagtgcggtggcgcgatctcagctcactgcaacctccgcctcctgggttcaagcgattctcgtgcctcagcctcccgagtagctgtgattacaggcacctgccaatactcccagctgatttttatatttttagtagagacggggcttcaccatgttggcaactcctgacctttggtgatctccccacctcagcctcccaaagtcctgtgattacaggcatgagccacctcacccggccgtgcccagcctttaatagtgattttatttttattcaacaattttagtcagtaggacttttcatgcccagttttagaacttgtgagttttattttttgtgtttgtttccaccaaatcacaatttcccccagtcattgtcttgttatttgcagtttttagtgttactaacaaaatgacttctggggtcggttactttgaatttttttcatgtgctgccattttcagtgtagtctgattatcttcactattaacattcactgaaaagtagaaaacagcctgcctcttcctggagtccctcctcccagcttctccactgaagacctggtgcttaaaggaagggaagttttctgggcagtggacccctggagtctcgaaacccttaagactcaaatgctcctcttagcaggtaatttcaatccatcccgcaacagtttgagcattcctcctttttagttggcccaaaacccagagtcttgctgccctctaaactctgaattgttctcccttccttggcatgttcctgaaaggttttctgtggacctctcccttctcttgcctgccttccaggcttctccacactcagcgtcagcctagggccatgtcagcggtgatttcccatgcctttgggaaatgtagtcactccagggaggctgctggggagtgttggccacaggggacagataggaaaggccttgagagctctggggagtaaactccatttcaagatataaaattcccagaaattttgaaatcacaggcattttcattttgaacactgtttataaatcttaaaatcatgttgtgagtttaaaagtcatttataccttgatttggtcattgcattaccataaactgtatttgttctatttagagctgtaaaagcctagggggtgaggtagggtgcctatagtaagggaactttctggattctgtttttttttgtttgtttgtttgtttgtttgtttttgagacgagtcctgctctgtcacccaggctggagtgcagtggcgcaatctaagctctctgcaacctccacctcccgggttcaagtgattctcctgcctcagcctcccaagtagctgggactacaggcgcccaccaccgtgcccggctaatttttatatttttagtagagacagggtttcgccatgttggccaggctggtctcaaactcctgacctcaagtgatccgcctgcctcagcctcccaaagtgctgggattacaggcgtgagccaccacgtccagcctctggattctgtataagactgggaggcgggtgcctagtaagggaactttctggattctggataaggctgggaggtgggcgcctagtaagcagactttctggattctagataaggctgggaggtgggcacctagtaaggaaactttctggattctagataaggctgggaggcgggcgcctagtaaggagactttctggattctggataaagctcggaggtgggcgcctagtaagggaactttctatattctggataaggctgggaggcgagtatctagtaagacactttctggattctgcataaagctgggaggcagtaatgttaaagtcctcaagagagaaacattatcttcttgagtttttctgattttcaaattctagtcttcagttacacctcaggaccatctgcaccacccacccatatcccaccagtgtgttttgggagccaagcagtcccctttcttgagctctgtgctgtgtttacagtaccttgactgggcacattcttcaagactagcacagtgccttttgctcatgacagctctgttgaaatgaatcagtcatttgcttttcctctctcccacctgaagccctgagtaagctcagagggttgagggtgggagtgggaaaccaggcaggtgacaatgagggccagtgaagcttcacaaagaactcagaaggaaccagtaagtcttaggagctcaggccaagaagacttactttcttataaaagaaagaagttgctgggcgtggtggctcatgcctataatcccagcacgttgggaggccaaggcgggtggatcacctgaggtcaggggttcaagaccagcctgaccaatatggtgaaaccctgtctctactaaaattacaaaaattagccaggcgtggtggtatgtgcctgtagtcccagctactagggaggctgaggcaggagaatcgctggaacccacaaggcagaggttgcagtgagccgagatcacaccactgcactccagcctgggcgacagagcaagactccgtctcaaaaaaaaaaaaaaaaaagaagaagaaagaaagaagctccagtagtgaaataagctgaagaaaactgaagtgacttcaaggaaaggaaaaagagaagtttcaagatccaggctggtcagtgaggaatgtggaatgtgtcctcagagctggtgaactctgcccaggcagaggagaggaggctgatggaaggcagacctcaggttgcccagcacttgccagtctgtggaagcctccgtcactggctcatgacacaggggtagggaggaaagaagagggctgggtgctgccatgtccaggaggagtgctctggggtgagtggccatgcagataggaatgaagtgcaaggcacttaccacctggtcagagttggaggcgatcgaaccctctgggaggctctgcagagtgaaatcatcaaggagcaggcatagggagggactcatctgctgtggagggactggctttgcacttttcacaggaaaggcctgacacagttcaggccccaaaggaatcgtcaccaaatgcaagaatgccaaatgcaggccaaaatggctggacagggcccactgcttgctctgctgtcccttcacacaccagggccccaaggactggcctttattacctgctccagaacagccatgaagcccacatgaacagcccatgggtgccgtaccctttcctgctgagctccagagattgccacaggaaacaggagtgaggtgcacacaaaactgggtataatggaagcacccggaagggctggaggctgtgacagctccaggttgtaagccccctggagaaccacgtctttttcacagatggtattttctgagagcaatatttgtttgaatccattccttatttgctactgtggtttgaagtgaacaaatgcaagtatttttctagggtttgagctgagtgtactgttaactggctataatttatcagtccctttttggtgaagtatgtccctattgaataagaagtgcacactttttaactcttatgaattgcttattttcattcatattggctgtgtccatttttaaaatcaggggaaaaattttatttacccagtgttttgaggtgggcccacatttttaaaatcatagttattttaactttaaaaataaagattttttggaatgtattgttgattaaaaataataataaagattttgaaattatcttttcttttaaatgaaaacaaaggatttgctagggtatttctggtttcataataggtcaccaggaaacatgtttacatcaggcagtcataggttttaggcatgtaacacttctgtggagtttgtattctttgggaactggacctgcaggtattctggggaacccaggccatttgttccatttgaaaatagctaaagcatgaagaaaaggcaaattcttagaattttaaagggttttctctcaagtagttttaaaatttcaaatgatggtgttgtatcccttcccttcagacctggaatcacattttcccctcaagacagaaagggctctgcggcaggttgtgcctgggaaggggctgcttctcatttgtggccacctctctgcccaggagctggtgaggaagggtgaactaggggatgcctttcagaacaaaggaggtgaggagatgagcccctccacatctgccccaaatagagaccggcgtactagactgagcactcacagagacgttcacgaagggactgtttgcggttgtgtgagattggaggcaggcctacagcagggcttctcatcgttggcactgtggacattaattggggtggtagggctatcgtgaacactgtagaatgttgagtagcatctctagcccctacctactaaatgccagtagcaccaccaactctgactctgacaaccaaaaatgtctccagacacgggcagatgtaccctaggagcagtgtgccctctggctgagaaccatgggtgaagggaagcagtcatgatgttgaggcacctacagacaagaacagtaggaagcccttcccacccctctggctgaaagggagaccccaggaatagtggaagtcagggaggaggagctgcccagcaggtgccctagccatgagggatgcagccactgctagaatcttcgcaactttctggggagggtgcaagaaagaaataccgccaactcctctcacttctaccctccagtataccagtgctcccttcacattaggagaagtcagctagaagcccggtggcaaggacacctgggtaaggcagtctattgaaatcagcatcttggggcactgggcagggtggaggaggggcacagaatggaaaacggaaaataatcattctgttcatccatccatccatccatgtattcagtacttatgagcagcttagcaaagtggtcaagaatgtaggtgctgggccgggcacagtggctcacacctgtagtcccggcactttgggaggccaaggtaggtggatcacttgagctcatgagttcaagatcagcctgggcaatatggtgaaaccctgtctctaccaaaaatacaaaaattaaccaagcatgatggtgtgcctatagtcttagctacttgggaggctaagatgggaagatggcttgacctgggagatggaggttgtagtgagctgagaccacaccactgcactccagcctgggtggcagagccagaccttgtctgcacagaaaaaaaaaagaaaaaagaatataggtgctggagtgctggagtcagataagcctggatttgtatctggccctaccacttgcaacctgtatcctgtatgatcttgaacaagttgtttatctaaatgtcagtcaccttgagtataaaatggcaacaataattctatctacctagaccttattcttgcaatcttggatttttccccaatgggaaaatgcaagtcacaagtaaattgcatagtataagaccacagtcaagtgctaagcgggtggtatctgggcagtacccagtgttggttttatagacagtcctgggaaaggaaagacacagggttcagccatgaagtgcccccctcagcatctgtgaacaccttgagcactgtgcagatacagtggagaaaaagtccccagtgggctgagaaacaccacaggatctgcgttgcgtcctgagggacaggccggcaggctaagtgaaaaggaggaagaagggaccccagagcagggaatggtgagtgaatcaaagccaagagagttggagggagggggaaggcccagatagcagtgtggggagaccactgagatgaggtttggttgagggactcagtgttctctcctgtaaaagtaaggggagggcctggggccagctgccttcttcagtaccatttcacaggggtcaccaactcacatgtccacagagaccactcaagtgagcacgcacgtgaaaggcgcgcgatgggaggcagtagggcggtcccaggctggaagcatccgccttctgtaggcgtggccaccgctctgctccagcagctgctgccgtcttctaatgcaggcctagagacaccacagtctgattttcctaattttcaaaagatgctagaaatttggatctttatgagaattgccctgatttttttttaaatccatgtgagctgtactaaatagtccctttgcacccctgtccagacactgctggtaagtccagacaggggtgcaaagggactgtttagtacagtttagctgacacaactcagcttagaacccaagttgtgtgtgtttggattctgcctccgcatatactttcttttaaatagtaggctctaagacttaaaacaaaaaggatgccaggcaaagtggctcacaccagtaatcctagcaccttgggaggcctaggtgtgtggatcacttgagcccaggagtttaagaccaacctgggccacgtggcaaaacccgtctctacaaaaaatacaaaaattaggggggacatggtagtttgtgcctgtagtctcagccaccagggaggctgaggtgggaggaccacttgagcctgggaggtcgctgcagtgagctgtgattgtgccactttgccctagcctgggcgacagagtgagaccctgtctcaaaaaaataaacataaaaaaaaggaagaggggtccacctgggcccggtgaagtctgaattccccccagacttaatatcatggccaggtagggatttgggggaagggatggctgtggacaagggcacagacagggacgagggcagagagagggtgggccatagtcctggtgctgcacccggccctggcacttggcccagtgcatgctgggactagggctgcccttgagagctctggccagcacatttggttcttctttgatgaaattttttaaattttcagataaaggacagagactgttaaccacaaacacctatgttccccgacccagacttcctactgggttctttgcagctggggagatgatccccttccattccttaggacactgaccttcctctgggccatttgtctccagtaggggtcagctgggagcttttaattggtggtaaaggttgaaatgatggcatttgatagcatggccatgaatgtactcacagagtgccccacctggaatcccagctctgagcctgggctctgatggccctggtgggtggagagccctggctagtctcggagtagagggtaaggggaggtaggggactgagaggcttctggcagccccaggaaatgttgactggcagagtcagctgaaccgagcttgtttttcatgactaatttaaagttcaggctcttcccctgctaaggggaagtgaagacgaccatggagaagactagaaataatgaggttatctggaaacggcctcatgaaacctgaatgtatttttgctcagaaaaaaagaaagtgcagtaacactcactccgtcagacgctgcctttgctgcccaggccaccccagcctgcctggcctcgcctccagtcctccctttagtgggcagcttgtctccctgcggcccaagcttgggctcctcactgcctctcggttgtgtgtgtcctctcacccaccctgcttagcctgtctgtgaagccacctcctccttccacatttgtttttcctttctgtcttttgattacccctactcatgatataatttgtctgtgtcacacaccgtcttcgactgtttcgtcacacttcgtgtgggtcagcttgcctctggcaactcttctctctcttagagtggttttctgggtggttttcctcatgtttcacacagcgtcctccacacacaggtgatcaataaatacttgtgggtagataaaatatcagattgatgggtgaatgggtgagtgggtggatgggtggtgagttggttggatggcagggccacccaacaccttggccagtcccctaaagctgagggatttttcagatgcctgaaggaggattctccagagctaggggcagggagaattcaacccattgccatttgcacagcatttactatgctgattgccctctcttgagaaggactagaaggcagacttgaccaatggccttagtctagaagtcatctcccccataatactttaaaatcagaccatgggctttttaatccgtggtctgaaatagttttcaaggttggcacctggaagacatccactttgacatctttctttcattcagtagttgaaagcaacctcaaagtctgtgacttacctgtctacctgcctagaaattaataatcacttcccctagtggggggaatcagaggctgagatttgtagtggaggcaacacactgtgtgaggcctgggtcttcacctccagccctgttggggggcgggggatgggggtggaggcgctcatcgtggaggcagagaagaagcaccagggagtatcagcacataacagggtttctgatagctaggcatctgccttggatggggagccctgatgtggctggggcagtagcaagatgaaggctatactgcagcagccctgaaggctctggtttgcttccctcctctgcagtcccagtgagttatcccttcacaaggatggaaggcaccagattaaccaattctaaatgctgatccatcacatttccaacatgattccaaatgaccacatgttaatcccacttgtgtaggcctaccacagacatgaatgtgtaccagctaaccccacccatttgaagcactccaggaagattctagggcatatttcttcttgccctagcagtgtagccggtgggaggaagagcctcggagatcatttattccccacattgacgtcttcctcccaccaacccccagctcccacagctcttggcatgtgaaccactccactgagcacctgatgtccctgctgttgcctgggtgtttgtcttaccttcccacctagacctcctgcttcttcattcccttttgtggctgattactattccattgtatgaatttataacagcattttatttatccatttattagctgatggacatttgggttatttccacatcttggctcttatgaacaaggctgctatgaacatttatgtacaagtttttgtgtggatgtgtcttttttctctctcttagatacactcctaggagtgcagtttttgggtcataggtttaatcttttgaggagaactgcaagactgttttccaaagtggctacaccattttacactcccactaaaaatgtatgagggttccaatttctccacatctttgccaaaacttaacttttttttattatagtcatcccagtgggtgtgaagtggaatgtgactggggttttgatttgcattttcctgatgattaatgatgctaagcatcttttcatgtgtttattaagagtattaagagttctttatgtagtttagatacagtcccttgtcagagacaggatttgttcatattttctccctttctgtgaattatcctttcactttctttttgatgttactttgaagcacaaaagttttccattttgacaaagcccagtcttccttctctcccttctttccttcctccctcccttccttctttccttccttttttttttttttttttttttttttttttttttgagatggaatcttgctctgtcatccaggctggagtgcagtggcacgatcttggctcactgcaacctccacctcctgggttcaagcaactctcctgcctcagcctcccaagtagctgggactacaggtgtccaccaccacgcctggctaatttttgtatttttagtagagacagggtttcaccctattgggtcaggctggtctcgaactcctgacctcaggtgatccacccacctcagcctcccaaagtgctgggattacaggcatgagccacagcacccagtctgacaaagcccagtttctctagtgttgcttgtgtttttgatgtcatatctaagaagtagttgcctaattcaaggtcatacagatttacttctatgttttcttctgtgagttttctaaggccaagcgtggtggctcaaggccgggcgtggtggctcacgcctgtaatcccagcactttgggaggccgaggcgggtggatcacgaggtcaggagttcaagaccagcctggccaagatggtgaaaccccgtctctactaaaaatataaaaagtttagccaggcacagcggcaggcacctgtaatcccagctactcagggaggctgaggcaggagaattgcttgaacctgggcagcagaggttgcagtgagctgagattgcgccactgcactccagcctgggtgacagacagactccatctcagaaaaaaaaaaaaaaaaaaatcaaatgagttttctagtttttgctcttacatttaggtgttcggtacattttaatttttgtatattgtgtgaggtaggggtccaacgtcattctttcgcaggtgtgtatccagttgtcccaggattactggttgaaaagaccgttttttccccattattttggtacccttgtcaaaaatcatttgaccataaatgtgagggtgtgtttctggactctcagtctgttgatttgtgtaatctgcccttgctgttctgttgatctatatgtctatccttatgccagtaccacgctgtctttattccctggtttttttttttttttttttgagacagagtcttgctccatcacccaggctggtgtgcagtggcgcgatctcggctcactgcaagctccgcctcccgggttcacgccattctcctgcctcagcctcccgagtagctgggactacaggcgcccaccaccatgcctggctaatttttttttttttttttgtatttttagtagagacggggtttcactatgttagccaggatggtctcgatatcctgacctcatgatccacccgcctcggccttccaaagtgctgggattacaggcgtgagccaccgtgcccggcccacgctgtctttattcctatagctttgtagtaagttttgaaatcaggaagtgtgagtcctccaattttgttttctttttcaagattgttttggatacacagcagattctttattttttgtagcaacacggtcttgtctcaagtgatccttccaccttagcctcccaaaattaggggattacaggtgtgagccactgagcccagcctctcagcagattcttaaaacacacttgttgcttggctgcttgctttcttgtttccttgatggactggccagcctgtaagagcctagctggcctgcatgcttaagtgacaaattcctctccctactccagcctcccttcataaggcatttggccagtagagatctaggcagttctggctgagctgtcttagtccagggcaaggtagtaagagaccgaatttggcaggttgcagctggtccctcaagcaggagatctaaatccaactcatccttccccccgcatccccaaaacatctcagcattccttcctcttctgtccttgccttgcaggcttggagtctgggtagttaagagttctatctagacccacttctggccacatcacaccagctcttcccttttgcctgtcatcccgccactctcctgccccttcctaaccatgattcatggcaaaatggtgcaagatgggccaggcgtggtggctcacgcctgtaatcccagcactttgggaggccgaggcaggtggatcacaaggtcaggagatcgagaccatcatggctaacacggtgaaaccccgtctctattaaaaattcaaaaaaaatttagccgggcgtggtggcgggtgcctgtaatcccagctactcgggaggctgaggcaggagaatggcatgaacccgggagacggagcttgcagtgagccgagatcccgccactgcactccagcctgggcgacagagcgagactctgtctcaaaaaaaaaaaatggtgcaggatagaggctacctgtcctgtcaggtggggctagtgcagcagcctagccttccttggtggcatctctggtcacccccataggttctttatggactcaacaggaatgtcacttgagctgcagatactgattttgctgatggatgatgaaatttttttcttccctgttgggctttcagtccttgccttaaggagaccataaaaaaagtggtgggaggccaggtacagtggctcatgggtgtaatcccagcactttgggaagccgagggggcagatcacttgaggtcaggagttcgagatcagcctgactaacatggagaaaccccgtctctactaaaaatacaaaattagccgggtgtggtggcgcatgcctgtaatcccagctacttgggaggctgaggcaggagaatctcttaaacctgggaagcggaggtcgcggtgagccgagatggtgccactgcactccagcctgggcaacaagagcgaaactctgtctcaagacaaaacaacaacaacaaaaaagtgataagctgggcacagtggttcatgcctgtaatcccagcgcattggaaggctgaggcgggtgaatcacttgaggtcaggagttcaagactagcctggccaacatggtgaaaccccatctctactaaaaatacaaaaattagccagccatggtggcaggagcctgtaatcccagttactcaggaggccgaggcaggagaatcgcttgaacccgggaggtggaggttgcagtgagctgagatcacgccactgcacacaagcctgggcaatacagcaagactcagtctgagaaaaaaaaaaagagtgataaacccactgggtgcagcggctcatacctgtaatcccagcactttggaaggctgaggtgggtagatcacttgaggtcaggagtttgagaccagccgggccaacatggtgaaacccagtctctacaaaaaatacaaaaattagctgggcaaaaacaaaattatctgggtgtggtggcacatgcctatagtcccagctacttgggggctaaggcaggagaattgcttgaacccaggaggcggaggttgcagtgagccaagatcacgccactgtactccagcctgggcaacagactctgtctcaatcaatcaataaaagttgaagggaaaaaagaaagaaaaaggccacttaattatcccttctctatacagattctcagccaattgagaactgcagaaaggagttaggtagaggtaaaaatggagattgtattgtaggtagaggcccagtcaacacatggctcagacccacagccaaaatgcaccttcaccccctccccttttctgtttcctggtttaaatctgggttctaggctgcagagcaagcagcatggggaacggggacactaaagggcaagtgtcctgggggacttatctggagctctcaagatggtgagatcagtactttcacctgcttacatgcaactaggtgctgctgtgtgacctctgaatagtcctggccctactgcagggtcactacccctgctgaccccaccatcaaaacctctggattgttgatgctgggtctccaaatctgcgctttgcatgcaccatgaaacttgttgccaactgtaatttcttgatgtgtgcaagtgggttacataatacccaacccataggatgctagaaggactggggagacagcatttgatcagggcctggcactcactaggccctcagtggggccatcccagtaagcctggttcaacacccacgggaactaagcctgctgttgcagattctcggtcgtctgcctgtgtgccgagtaagtctttcgggggccagatggtcagggtaagtctgtgtgctcaagttagagatgtggatttgggagtgatcagggctcaatagaaatgcatcattgaaagacaggcctttcaatgtcagttggtgcaagatgggcctacagaggtccattgtgcagtgggctttcagtcccgtgtttcagacaccctccaggtttgggatgggaggggcagagttgttaggggaagtgacaacacccctgagcctccctccaaacccatatttaggattgtctaaggccaaatgttgaaataagcaatggtttccccaaggccccctgcttcctctttctgcacccttctattctttcagtgcccttcctccaagcacccaggaaaacaagggtccaaaaacaaaaaactccgagacagagggcagcaaaataggagccaaatgcagcctaccacctgctttttacagcccatgagctatcaatggtttttacatttttaattggttgggaaaaaataatattttgtgacacattaaattcaaatttcagtgtccataaataaagttttattggaacacagccacaaccatttgtttacagattgtccatggctgctttcagccgaggtgaggaggtataggcttgcaaagtctaaaatattgactctctggccctttaaggaaaagcttgccgatgccctgctctaggatgtgtcttgtgcccaagagatctgctttccaaggaaagggcaaaccagtcaaatccaggcagatgtgcagaggagacactggacagggaagccttcctgatccttctggtgacactggaggagcagaggggagataactctctaatcctgcagatggaactgcttctgtccacactgagttagggggcatggaaacagtgggttcaggcctatgactcattctaacagtataaatagcaggattcagaaggtgattaatcgtctccagtgagcccaccctaccagcttccctgccaggctggtggcagcgattttacctgaggcctttattgttcccagggtcctgcaggctgccctggggtcggccctgagcagtatattcattgctcacctttctcctgtctttgcagagtttgccttctgccaggtggatgcctccatcgctctggccctggccctggccgtcctgtgtgatctgctccagcagtgggaccagttggcccctggactgcccatcctgctgggatggctgttgggagagagtgatgacctcgtggcctgtgtggagagcatgcatcaggtgatcccggggtgtcaggggagtaggaggcagggttggagtgtcctaaacccgctagatgcagcacctacagcctcagctgggcttttgcatgcttagacacagagcaggaaccactaggaaagtcacccactgggtgctgccgaggacacggggacactcttaggctgacttctggggtgctgatggtcagcctccagcttagccaggggagagaactcggaaagaagcccctggccgggcacagcggctcatgcttgtaatcccagcactttgggaggccaaggcaggcggatcatgaggtcaggagatcgagaccatcctggctaacacggtgaaaccccgtctctactaaaaatacaaaaaattagccgggcatggtggtgggtgcctgtagtcccagctactcgggaggctgaggcaggagaatggcgtgaacctgggaggcggaggttgcagtgagccgagattgcaccactgcactccagcctgggcaacagagcaagactccatctcaaaaaaaaaagaaaagaaaagaaaagaaaaaaagaagcccctggatgcggagagttttattatggagactgcttgttagtcagtattggagttagcctggggcttcccaaagttaggtctgagggtgaagcattttcagagaattaggatctttgctgggaacttcctgcttgaagaaaactattattagccccctccagggtgggtgcagtcacagatagggaaactgaggacaaagacaagcagcaaaagcatcctgagaactgaaattgatcgccaccagcatctgactcagctggccttcttggcatccccagcaggccaagggttcaaaacgcattgtccctctttatgagaaatttggagacatggtaagtgtctgacaaaaggaccttgagaatcacagtgttatagaaacaggacacagcctagtgtcctgtgtttggagattccttcctctctggcctgctgcagagatgacctttcctccctcctctccaatttccagctgcaccttaaactctagagcccactcccttgttgaagtccccttttcagcatccatcccccaaagtatcttgactttgaaccacaaacacatctttatccaaggtcatgttaagtctggggaaaaaattcctctctggtggagaaatacagtgagtgaaaatagaaggtgaccttcaaggctgcaagtggtgtgtgtacatggatgttgacaggcaagagtgcaccctctgtcaggtgggggaagggaaacccctcttgcatctggcagggtactgcttggtctggactggggcttgtcaccattccctgtaagactgactttcggctttttcatctgatttaggtggaagaagactacctgtttgaaaaagcagaagtcaacttttgggccgagaccctgatctttgtgaaatacctctgcaagcacctcttctgtctcctctcaaagtccggctggcgtcccccaagccctgagatgctctgtcaccttcaaaggatggtgtcagagcagtgccacctcctgtctcagttcttcagagagcttccaccagctgctgagtttgtgaagacagtggagttcacaagactacgcattcaagaggaaaggactttggcttgcttgaggctgctggcctttttggaaggaaaggaaggggaagacaccctagttctcagtgtttgggactcttatgcagaatcgaggcagttaactcttccaagaacagaagcggcatgttgaagaaaatctgggggactgggatgggggtatgtgtggatttttcctccactaaatctgcaggaaacatgttgaacataaattcaaaaattttatcccattcatgcctcccctacttctgtgagtccagtcgtctgtcactccttacagagaaacttttcttcagttcactcattcagggcagcctattttattgctgctactgtaggaagtgaggcgactccgttgcagatttactctgtccccaggtgcaggccacctgcaggcctgaatgagcctttttcatcccccagggcctctaatgccctgccatagccgccctgcattctctgtgaaatgactacagagagttggattttagcacatacacatgatccctcccctctccccttttctggctttatgtaggggctggattagttggcaaacagcccatttggtcagatttgtgaattttgttccattttagcaaagcagaaatatgttccaaatgttggatcctgggagaattcaggatcaactttgcacaaataatttatttttattgtctgcatgtgttaagtcctgcagtgacctacacattccatcctaattattcaaagagccattgagcatttcccctaccccccaaaaagtatgctaatgctaggaaacctgattttgccacccagtgaaagtatatccgtcctcttagctgtgaggaggaacctggggaaaggagagtcagagaaaatgacttattctgtgcctacattgtttacctatcgcttggtggcagtaacaagtgtctcacttaaaatgccattaaacacatttatcagctgggcgcggtgtttcacacctgtaatcccagcatgttgggaggctgaggcgggtggatcacaaggtcaggagttcaagaccagcctggtcaagatggtgaaacccccgtctctacaaaaaatgcaaaaaaaattagctgggcgtggtggtgggcgcctgtaatcccagccactcgggaggctgaggcagagaattgcttgaacccgggaagcggaggttgcagtgagccgagatcgcaccactgcactccagcctgggcgacagagtgagactcgtctcaaacactcaaacacacacacacacacacactctcactctctctctctctctctcacatcctttgcagtgattttaatctagaaaccttaatgattttcttccttttcaagcccagcccagccctcttcctcacacatccagcaggtggcgctcttgcaaacgttttgctgctggtccagtttttcactggctcaccatttttcatttataatttcagaataagtgttacccactaatagttatcttgagaatcatagctttggaagggtagtagcttcatccgcattcatttttcatcctactgatctgaaaaaaacatttcatagtatgtaaatttgctccagattttagggtctgtaaaaaaaaaaaagtactcaggtaaatgatcacttagagtaatttcattgatgtttcacagagtctgaaggggcgggttagaggagagtgagtttacaatcatttcctactgcagaaaagctcatatttcaaatgtaattcatcgctcttcgagagaaaaccatctaacactaaaaatgcagctgtaagccaggcatgatggtgcacacttgtaatcccagctactcaggaggctgaggtgggaggatcgcccaggagttcatgcctgtgaaaggccactgcactccagcctgagtaacacagcaagaccccatcactaaaagaaaggaatttaagaacaaaaaagcagccatactggaagtataggaaaggggctttgtaggaagaggcaggaaagaagttaactcagtgtccaaagttttgtcctaaagagaacaggaaattccctgggtggttttgcaaccactcggccccaaatgtggtttttgtgatcctgaattaattacctagttaggaaactgtgtagcccacacctgatggaaagctgccaacctaacactttttgttctaagacctagctggtgagaagtgagggacttggtaaaataaatgtggtgataaccacagaaaaataataatgaaactggcccaacaaagcccagctcattggaaatggccagcacttctttttttctccatttaaaatgaaataaaagcagctacattagacattttatactagcaggtactctgtacacaagcatgtcccgtaacatgtccacatgttatctccagaatcctaatctgcaaagtgggtgttctcacagctgttgactgggactcaccccagatttggacgttgtttcaaacagatgtttccactggttctgtatctgaaatcttgttactaacctaataggagtgcctagggaagtggctgtttcacagtttggtgagatgtttggggtcatctcaccaaagaacaaaccagaccacagttgcccaggtatgtcaaggggtcagtgtagggtaggtgctaaaagtgaaactggtccctctgaggtcacctgctcttggctgtgagtcctagggtccaggacttgggtgcccccacagctctgcactcatgattctgtggctctctgtccatctggccacagttcagaagccaggctttctccacccttacgcttttgtcaatttggtttaatacataaagatggtttagttcttgcttgtcttttaaacaccttcacagatatcatttgcaccttgccaaaggtgagagatgaataaagcaagaatattatcttcgtttaacaaggaaacccaagtaccaaagagatgatgtgatttgcctaagaccacatgatttctctggggcaggacctgaactccagcccagcattcctgatccttaccctggactctggctccctgggccatgaggggagtacagtagtgggaaatgcaggatacactccagggactcgaatccctgagtggcaggcctagttctttccccagcgggtccggggccttcgagcttcaggcccaagctttttgtggcaacctgtatgaacgcggagggagaagtgccctagaccagactccagatcgttcctagtggggctgtcagcggctttagcctcactgggcgctagatgggagtgtcccctccgtacccggacgaaggcggggcgcccgctggcaaagcgcattttccagcgcaagctgttggggtgcggggctggcgagtgagggaaaacagagggtggcgcgcccaccatcagcgtctgtgcagccccacctgcgccgcgggttggtctcagccggatcctgcagccctcatcgagcaaaggctgggcgcggcgcccccactgccggggagggaagaggctgggaggacgcaacaggcccaggctgtgccgggcggggagcctcggcaggcagctgcacccccagccccagagggctggggaaggccggcccgaccagcagacggaaaggtggcgctaagtcgccttcaagcccgcacggctctcccggcctttcctcctgtcctcagagtcagctcccccgcccgggacgtcccgcgccactccgcgcctttggccctggctcaaggtcttgtgatgtgattagcaaagccagcgccttgtcctcagacactcagccctgcccggcaggccccggcgctcaagccctgtttactgagcctgggcggggagggggcggagaaacgagcccgggctccaccggcaagactgccgcggcggccgcccgcgtggccacccccacccccaccgcgactccacgtgcagtcgggctggagccgccaccgactggacgcaggccccgagcccccgcctcctggccggggcaccctttgcaaacccgccgggccgcggggatggttgcgatattctggcattttgcaattcccgcgcccagtacaaaaccgaaggtgggagcttaaagctccacaggtccgcctcggagaacagggcagggaaagacacgtccagggctgcagaatcccggccacgctaaacgtaccggggctctccgaccgcgcagccccggaggagaacagccgtgccttcccgccgccacccggcggcatccactggggccgagagctacacgccacaccggccgcccgggccgccggccccgcccggaggcctgcagcaccctcccccggaggtaaaaaaattggcggcggccaatgggaggccgggaaggcgcctgacgtccgcgagcgggcgggcggcgttgcctggagaccccggcgggggccgagttctgtcccctcccccggcgcgcccgccccgccgcagccgcactcccgggctctatatagggcgcgcgctcggaggccgccgagttccagcagtccgcgagctgccgtcggctccgcggggggggcgggccgggcaccccggggcgcggaggagcgctcctcgcttctctccttcccccctgccgcactccgccggaccctcccgccggcccgcgccgctgcactcgccctctcctctcgccccccggcaaactttcggcccctccccgcccctcgcccgttattcgtcgtggctcaagcccggccacgccgccccaagggctcctcccgacctcccggcctgccgctccggccactgcgggatccagaaacatgtcgaccacacttctgtccgccttctacgatgtcgacttcttgtgcaaggtaggccagggagcgggcccggccggcagcagccgttgtagttcttggactttgcctctgtccccaggttctgggggacgcccctcccgccctgcctttcaggtcgggaaagtcccggggtttgcaaaagagtgtccgagcgccctggaggcggggagggcggcaaggagggcgccggtgtcgcggttgagtttctccactgccgaccgcggccacgctgcccggggcttcccggacaggcttcgcgccgcccacctcggcagccggggcggaggatcacgtgtcgaaacccagcgcggcccacggtgggcgtcctctcctctcccgctccgtccagcaagatcttgctggttttgcgcgtgtataggtggagggtggaggccgagtcgggatccgccaagagtgggggaaaaaaaggaaaagaatcaggctgggagttcctctgcggctcgccccgagtctgtcttccccttccgtttttcatcccttccccgctcccctccctttggcagacagagaaatccctggccaacctcaacctgaacaacatgctggacaagaaggcggtggggacgcctgtggccgccgcccccagctcgggcttcgcgccgggattcctccgacggcactcggccagcaacctgcatgcactcgcccaccccgcgcccagccccggcagctgctcgcccaagttcccgggcgccgctaacggcagcagctgcggcagcgcggcggccggcggtccgacctcctacggcacccttaaggagccgtcggggggcggcggcacagccctgctcaacaaggagaacaaattccgggaccgctcgtttagcgagaacggcgatcgcagccagcacctcctgcacctgcagcagcagcagaaggggggcggcggctcccagatcaactccacgcgctacaagaccgagctgtgccggcccttcgaggagagcggcacgtgcaagtacggcgaaaagtgccagttcgcgcatggcttccacgagctgcgcagcctgactcgccatccgaagtacaagaccgagctgtgccgcacctttcataccatcggcttctgcccctatgggccgcgctgccacttcatccacaacgcggacgagcggcggcccgcgccgtcggggggcgcctccggggacctgcgtgcctttggcacgcgcgatgcgttgcacctgggcttcccgcgggagccgcggcccaagttgcaccacagcctcagcttctcgggcttcccgtcgggccaccatcagcccccgggcggcctcgagtcgccgctgctgctcgacagccccacgtcgcgcacgccgccgccgccctcctgctcttcggcctcgtcctgctcctcctccgcctcctcctgttcctcggcctccgcggcctccacgccctcgggcgccccgacatgctgcgcctccgcgccggccgcggctgcggccgctctgctgtacggcaccgggggcgccgaggacctgctggcgccgggggccccgtgcgcggcctgctcgtcggcctcgtgcgccaacaacgccttcgccttcggtccggagctcagcagcctcatcacgccgctcgccatccagacccacaactttgccgccgtggccgccgccgcctactaccgcagtcagcagcagcagcagcagcagggcctggcgccccccgcgcagccgccggcgccgcccagcgcgaccctccccgccggggccgccgcacctccctcgccgcccttcagcttccagctgccgcgccgcctgtccgactcgcccgtgttcgacgcgccccccagccccccggactcgctgtcggaccgcgacagctacctaagcggctccctgagctccggcagcctcagcggctctgagtctcccagcctcgaccctggccgccgcctgccaatcttcagccgcctctccatctccgacgactgaggcaagagggcgccagtgaggaggaagggaaggcggttcagagatgttggaggacacccctcgccatctcgcccttgctgggggcacgggagtggggggggtgacatgggccctaggcagactgcaagcccgaccgagcacttggactcgaactctgtgccgggaggggcccccacccctcctttttcggtttcctcttgtctttttttttttatttttattacgaagtttcattctttttgagcaaaaaagtcgaactttttctgttgaacaaaatattcacaacagggcagttgtgatacgaatagaacaaaaaaaaaaaaaaaacacttaaactttgttaggactccgatgagtttgggacttcaggaaaaatcaacccagcaccagcagctaccaaccaccattccatctcttcacttgaacagcattagttaagtccagatgtgggaacccttctcttggaagaagttcctaattgtgtctcagaccggtgtaaacaaaccagccagccgccaccttgctaaacctataagctttttaaaatccaatatattctgccaagaatatgccttgatagttagccctcagcccataggtgttttttgttttttaacagaattatatatgtctgggggtgaaaaaacccttgcattccaaaggtccatactggttacttggtttcattgccaccacttagtggatgttcagtttagaaccattttgtctgctccctctggaagccttgcgcagagcttactttgtaattgttggagaataactgctgaatttttagctgttttgagttgattcgcaccactgcaccacaactcaatatgaaaactatttaacttatttattatcttgtgaaaagtatacaatgaaaattttgttcatactgtatttatcaagtatgatgaaaagcaatagatatatattcttttattatgttaaattatgattgccattattaatcggcaaaatgtggagtgtatgttcttttcacagtaatatatgccttttgtaacttcacttggttattttattgtaaatgagtacaaaattcttaatttaagagattgtatgtaatatttatttcattaatttctttccttgtttacgtaaattttgaaagattgcatgatttcttgacagaaatcgatcttgatgctgtggaagtagtttgaggaacatcctatgagttttcttagaatgtataaaggttgtagcccatccaacttcaaagaaaaaaatgaccacatactttgcaatcaggctgaaatgtggcatgcttttctaattccaactttataaactagcaaaaaagtgtttgcttattccaccagttctactgtgacatactcgagtataaagacatgtagcaataacggggagtggggggggagtctcacagtgcctttggaagggcccgaacttgccttaaatcttcctcaaccaaataagtattttattagtgcttgagagaatctgaatgtaggatgggttcaactgcacaaaaggaaaagatttttaccactttttttatatagatataaagtgaagcaaccgccttagtgctgaaatatgtagtacatgaatatgccttgtttaattacagaaaattccaaaacttgtactatttttttttccatgtagaaaggcaggaatgtctcctaagctttcctggacagcagatgaatgagcggtagctttagtttgtacgtaggtacagttggagcactatatgtactctctggactactttggacagaagtaggtttttgaatgtaacaagataagtcaacttgagttgtaatatattttggggaatcagctcactacaaattgtgactgtaaacattgtactgtaaatgttttgtagttttcccccaataaaatttttgggaaaaaaaggtattaacatgtaagagctttctttttaaacaggaatgtcttagctttctagcttcccagctaaccatgtctgccattccccaggtcttggcatggtgggggaggacttggagagctggcagagccagagttcagaagagcctgcgtcctctcagcccgtatatattttataagcaagttcttctaatgaaagaaagtaattatttggactgtcaagggcattagttagctagttgttccctttggtaataagatgcatcccagagttagctggctgggagcagagcctggccgggaggcctgaaggggtgtggcctgcctgtgagtcactgagtggatcatgtggctgcggtagcagctgagggtccgattttttgctgggaaacacaactgcttgggtggggaaggggaggaggatctttctgcagccggtggcctgccaggcctgagtgctgagctggaggtggagagtgaggccaggctttttctgggtcggagaactggagttctgcctggattttggaaagcttggtatgtccttgtggacagggtggaggggaagattaaagaggttaaacttatatctgggtgatgtttgcttatgcggacaacttcctctgggaatgaacacatacaagttatttatgcaaaaaagatttcttgtctgtgctttagaggactgtaagtgaccagaaagcaaattcaacccaggtctctagaaaaaggaaggaaaaaaagacattgatttgcctgctgatttcgcaaacggttgaacaaaatcttactatagtgactctggctgtttctaactttaaaacaatcactttaggaacttaaatcgggttcataaatcaattcatgtttcttctcctccaccgccgtcccccatgcacacagttcagacactttttccaaggtaggtaagagatttagcaatagtttgctttctcatatacaacagctgggctccatcaacaatcctcgcatccccgctccctcccgggccctgccttagccggggtctctggtgactcacagctgagcatggaggggagggggcggtctggtggatacgccaggcctcgggcagctgtttcacgttaacgatgattgcactggtgttaactggagcgttttggtgcttgttgcttgctgccaaaggggatgggaaacagtttcaaggttctcccagatgccagcccctgactgaaggcctcagcagcaggggagaggaagcccgaggccaaggagggctcaggaggggtgaagactgcaggctccctggcccctacaccataaagaatgtgcagtggggaggaaaagtctaaaatgtgctatttaggttaagctgcatttcaaaggccttgtttccacttcattcctaaacttatttttctaaacaagtacttttgatcagctggaatgttgggggtaagccacattcatttttaaaaactggtttgtttgaaaagcccaactgttaggatctgaagttttgtatcgcagacccagtggagcgtggaaagctacggggggatcattcagaaatttc

SEQ ID NO: 243 - DNA, 3765 bp, Homo sapiens
atgtcatccatttgtaacagtctttttgaagcattgtttcctggatcttcctactcgactagattttcagctttaaccattttaggttcaatagctgaagtttttcatgtcccagaaggcagaatttatacagtatatcagctgagtcatgatattgatgttggtcgtttccaaacactaatggaatgttttaccagcacttttgaagacgtgaaaattttagcatttgatcttctgatgaagttatcaaaaacagctgtacattttcaggattcggggaaactgcaaggcttatttcaggcagcattggagctcagcacaagcaccaaaccatacgactgtgtgacagcttcctacctgctgaacttcttaatctggcaggatgctctaccgtcatccttgtctgcctacttaactcagcaagttgcatgtgataatggagataggcctgctgctgtggtggaaaggaacacattaatggttatcaaatgcttgatggaaaatcttgaggaagaagtatctcaggctgaaaattctctgcttcaggcagcagcagcatttccaatgtatgggcgagtccactgtataacaggagctttgcagaagttatctctaaacagcctgcagttggtgagcgagtggagacctgtggtagagaagctccttttgatgtcctacaggctttccactgtggtgtctccagtcattcagagctcatcccctgaaggcctcatcccaatggacactgattcagagtcagcaagccgcttacagatgattctgaatgagattcagcctcgagatactaatgattattttaaccaagccaaaatattgaaagaacatgatagctttgatatgaaggacttgaatgctagtgtggtgaatattgatacttctacagaaatcaaaggtaaagaagtaaaaacatgtgatgtaactgcgcagatggtgctggtatgttgttggagaagtatgaaggaagttgctttacttttaggcatgttgtgccagcttctgcccatgcagcctgtgccagaatcttctgatggattattgacggtggagcaggtaaaagaaataggagattactttaaacaacaccttttgcagtccaggcacagaggagcatttgaattggcttatactggttttgtgaaactcactgaagtactaaacaggtgcccaaatgtgagtctgcaaaagctgccagaacagtggctatggagtgttttagaggaaattaaatgcagtgatccttcatctaaactctgtgctacaaggcgcagtgctggaattcctttctacatacaggcactgttggcatctgaaccaaagaaaggcagaatggatttgttgaaaataacaatgaaagagttaatctctttggctgggcctacagatgacatacagagtacagtcccccaggttcatgctttaaatatccttagagcattgttcagagatacgcgcctgggagaaaatattattccttatgttgctgatggagctaaggctgcaattctgggttttacatcaccggtctgggcagtgcgaaattcatccacacttctctttagtgccttgatcacaagaatttttggagttaaaagggcaaaggatgaacattccaaaacaaatagaatgacagggagagagtttttctctcgtttcccagaactctatccttttcttctcaaacagttggaaactgtagccaatacagtagacagtgatatgggagaaccaaatcgtcatccaagcatgtttctcttacttttggtgttggagagactctacgcttccccgatggatggtacttcttctgctctcagcatgggaccttttgttcccttcattatgaggtgtggtcactcacctgtctaccactcccgtgaaatggcagctcgtgccttggtcccatttgttatgatagatcacattcctaataccattcgaactctgttgtccacactccccagctgcactgaccagtgtttccggcaaaaccacattcatgggacacttctccaggtttttcatttgttgcaagcctactcagactccaaacacggaacgaattcagacttccagcacgagctgactgacatcactgtttgtaccaaagccaaactctggctggccaagaggcaaaatccatgtttggtgaccagagctgtatatattgatattctcttcctattgacttgctgcctcaacagatctgcaaaggacaaccagccagttctggagagtcttggcttctgggaggaagtcagagggattatctcaggatcagagctgataacgggattcccttgggccttcaaggtgccaggcctgccccagtacctccagagcctcaccagactagccattgctgcagtgtgggccgcggcagccaagagtggagagcgggagacgaatgtccccatctctttctctcagctgttagaatctgccttccctgaagtgcgctcactaacactggaagccctcttggaaaagttcttagcagcagcctctggacttggagagaagggcgtgccacccttgctgtgcaacatgggagagaagttcttattgttggccatgaaggaaaatcacccagaatgcttctgcaagatactgaaaattctccactgcatggaccctggtgagtggcttccccagacggagcactgtgtccatctgaccccaaaggagttcttgatctggacgatggatattgcttccaatgaaagatctgaaattcagagtgtagctctgagacttgcttccaaagtcatttcccaccacatgcagacatgtgtggagaacagggaattgatagctgctgagctgaagcagtgggttcagctggtcatcttgtcatgtgaagaccatcttcctacagagtctaggctggccgtcgttgaagtcctcaccagtactacaccacttttcctcaccaacccccatcctattcttgagttgcaggatacacttgctctctggaagtgtgtccttacccttctgcagagtgaggagcaagctgttagagatgcagccacggaaaccgtgacaactgccatgtcacaagaaaatacctgccagtcaacagagtttgccttctgccaggtggatgcctccatcgctctggccctggccctggccgtcctgtgtgatctgctccagcagtgggaccagttggcccctggactgcccatcctgctgggatggctgttgggagagagtgatgacctcgtggcctgtgtggagagcatgcatcaggtggaagaagactacctgtttgaaaaagcagaagtcaacttttgggccgagaccctgatctttgtgaaatacctctgcaagcacctcttctgtctcctctcaaagtccggctggcgtcccccaagccctgagatgctctgtcaccttcaaaggatggtgtcagagcagtgccacctcctgtctcagttcttcagagagcttccaccagctgctgagtttgtgaagacagtggagttcacaagactacgcattcaagaggaaaggactttggcttgcttgaggctgctggcctttttggaaggaaaggaaggggaagacaccctagttctcagtgtttgggactcttatgcagaatcgaggcagttaactcttccaagaacagaagcggcatgttgaagaaaatctgggggactgggatgggggtatgtgtggatttttcctccactaaatctgcaggaaacatgttgaacataaattcaaaaattttatccc

SEQ ID NO: 244 - protein, 1208 aa, Homo sapiens
MSSICNSLFEALFPGSSYSTRFSALTILGSIAEVFHVPEGRIYTVYQLSHDIDVGRFQTLMECFTSTFEDVKILAFDLLMKLSKTAVHFQDSGKLQGLFQAALELSTSTKPYDCVTASYLLNFLIWQDALPSSLSAYLTQQVACDNGDRPAAVVERNTLMVIKCLMENLEEEVSQAENSLLQAAAAFPMYGRVHCITGALQKLSLNSLQLVSEWRPVVEKLLLMSYRLSTVVSPVIQSSSPEGLIPMDTDSESASRLQMILNEIQPRDTNDYFNQAKILKEHDSFDMKDLNASVVNIDTSTEIKGKEVKTCDVTAQMVLVCCWRSMKEVLLGMLCQLLPMQPVPESSDGLLTVEQVKEIGDYFKQHLLQSRHRGAFELAYTGFVKLTEVLNRCPNVSLQKLPEQWLWSVLEEIKCSDPSSKLCATRRSAGIPFYIQALLASEPKKGRMDLLKITMKELISLAGPTDDIQSTVPQVHALNILRALFRDTRLGENIIPYVADGAKAAILGFTSPVWAVRNSSTLLFSALITRIFGVKRAKDEHSKTNRMTGREFFSRFPELYPFLLKQLETVANTVDSDMGEPNRHPSMFLLLLVLERLYDMDGTSSALSMGPFVPFIMRCGHSPVYHSREMAARALVPFVMIDHIPNTIRTLLSTLPSCTDQCFRQNHIHGTLLQVFHLLQAYSDSKHGTNSDFQHELTDITVCTKAKLWLAKRQNPCLVTRAVYIDILFLLTCCLNRSAKDNQPVLESLGFWEEVRGIISGSELITGFPWAFKVPGLPQYLQSLTRLAIAAVWAAAAKSGERETNVPISFSQLLESAFPEVRSLTLEALLEKFLAAASGLGEKGVPPLLCNMGEKFLLLAMKENHPECFCKILKILHCMDPGEWLPQTEHCVHLTPKEFLIWTMDINERSEIQSVRLASKVISHHMQTCVENRELIAAELKQWVQLVILSCEDHLPTESRLAVVEVLTSTTPLFLTNPHPILQDTLALWKCVLTLLQSEEQAVRDAATETVTTAMSQENTCQSTEFAFCQVDASIALAVLCDLLQQWDQLAPGLPILLGWLLGESDDLVACVESMHQVEEDYLFEKAEVNFWAETLIFVKYLCKHLFCLLSKSGWRPPSPEMLCHLQRMVSEQCHLLSQFFRELPPAAEFVKTVEFTRLRIQEERTLACLRLLAFLEGKEGEDTLVLSVWDSYAESRQLTLPRTEAAC

SEQ ID NO: 245 - DNA, 24995 bp, Mus musculus
  misc_feature (1)...(24995): n = A,T,C or G
agacatgtgcgagtaagcagtgaggacgatactcagagcttcaaggagcatgcgccaaggtcagggatgtacggtaggtagtctctgcagattctttttaccctcactctcacgaatccaatgtgggaaaagcaggctccttgtgagctccggactggtcccagagtcagtgcacagtgctcagccgcagctccccgggagcaggggacggagagcacatgcgggaggatgaatctagatcatctgcggaagccaacgtgctcccatttcatttacttcaagactcttagccccaccttatgtgaatgtgaattgtaagttgtcgtggtaggcgattaatcccactcaaatggctgggacatttccaaacttccatgtggctgacactctcccctccaatacgcctgggctgtcctctaatcccaagcaagtaagtggagacagttggccacttactaaaatctatattccaatctttgcaatgggggcaggggctggggccgctcttgccggctcttccatgattgctgtgctctccctcctgcagcctcgggcctggtctctctcctttcccgacacagcggttctcagtcccctctctgtccctttgccctcaaatcctaaagtcccatgtctgtctccctgcccagccattggccgctggccattttattcaccaatgaaaaccaaacgagggcaggaatcctcagggttttagatgcaggtcctcctgcaattttgggaacccatttaacataatacaagcattaaaccaaatccaccacagcaagtatccagcattatgtagcacagtggagggaactcctaaaactcgtacgatcagagacacttgagcttcaggctgcagacctcagattggcctcctgagacgatccccctgggaaaaggtacctcagggttgctatctgaaagcaaagccaaggttaaactcctgtcgacacaggtcaacccctgcactcatgcccctcttggaaatgtgagcctttgtgtatctgtttgagacaggctcttgagtagccaggctggttccaaccaaagtcactggacagatcagcctttgcccgcccctttcaagcagtggaattctaggcttgccctgccatgcttggctaacacaagccgcttgatccctccagcaagcaaaggcatgtaaaaccagcccgaggacactccgttcagagctgtctggggcttgtcgtttaagctggtggacaattgtcttgggacacaagcatccatctgggaaggcgtcctctaaccccaagcatcatctccccacccacccccttccaactctacctctacagctaaatgccagcgtttggctcaggaagcctcagttcagtgtaaagacaaatatacatggtgagtgttgtgcccgcgttgttatcggccggttctgtgtctgtgtgtttcagttaacactggatctccttctgggttacaactctagccagcaccttggatttcctagcaaggacgtcagagctggatgtgagttgggcaatctaaaggacaggacagggccagagcttgcggagaagaaacacaggctgagcgctttcactattgccaaactcaggttccagggggtcttagaaaaatccaaacaggcatgggatgacagcgccttaccattccatctttctgtctggttagcttctggagatgctgatccatccagggccctctaagctacctgcagcactgaagggcacaggtgggccttggactacattcagtctaatatcaccccccacacacacaaccccaccacaccaactctgggaacccagcacacttgctaccccaattcaagccccgtgtgcctgtgcttctcccgtgttatccttaagccccatatccccttgtcctgactcctttctatttttccttcacttcagtccccagctcttacccctccaagtcctcgtagggccacacacactctactcacaacccaaagtgaggccaggcacatacagccacggctcagcatgcctcctggaaggtcgtgtgggcaatgtggtgatacccgtgggccttcatggttgttcctaacttgtcatatgtgagccggacggcagttgtcttcgctttgagaacgagctttcatggttccatgtgctgacctagacagaggacctcaacatgtggctagaagacgcctccatggccatactccacacgccatattcctggggcagccactgactgcttcccactggtggccctcatgtcaatgcccttcaatccacttcggcctgttggtccagcccccaggtgctcccagtggcagcctctgtgtctcctcctcacagacctccacaaacccacaggcttggattgccatcagaagttctctggagctgaaacccttccccgagggtctgtgggttcagggagtggcccgatcattctgcagaaagacaagaatccctggaaaatctgagccaccgctcaacaagggcaggccacgagagggcagaattggcccacatggccacagagaaggggaaacttagagaacaaagatggagtgttcttgacgggagcctgtgtagatgcacatgagagaaggagggcatccgataagatgtcgaggaagctttagagagacgttccctccattacttggtgactctaggtcagcaacagaaccaagaaagcccattcccaaaggccagtgaagagtgggcttacaactgcagtctggctcacgagtgacgagttagaaacaacaatgaaggccctcgggaaacaccacaggctctgccacattgcccacgtggttcccagggtgctcttggcctggctgatgggtggcagtgctgtactgtgcacagcctttcccgctgtgcttgacagttctgtcctctaatcctaagcaagtaagtggggcagttggccaccaagagttactgtgcgctcaagctggagggcatccagacccttctgcctgcaagtggtgagatccaggatgccagcctgacccaggcccaggatctttcttggaacatccctccttcagaagccccaacctggctaaaacacatgggggccttcactcgggtttctcaggggccccccataaatgagttctgctatcacagacccagtatataaaaagtaactggggtcatataagtatatgccggggtaaaacagtgttattaaattatggaaagttcctttaaacaagccagaccttaatcccagcactcaaagaagatgaggcaggggaatcatgcttgtgaatagcctgaatcatatagtgatacatacacgcacacacagatagatagataaatagatagatagatagatagatagatagatagatagatagatagagatagagactgagaagacaatactatcaataaaattgttgttaggcaagcataaggccctgagttcatatctccaccctcacaccagccccacacacatgtaaaaagtcacctaggtatcctgtgcccataatcacagtggtgggggaaataaggacagaagggtttctgtgtctgctaaccagctagacttactgaattggtaaactctaggttcagtgaaagtccctgtctcaaaaggaaagaaagaaagagggggagagggagggagggagagagagagagagaaagagagagagagaaaggacactctacattgacctttgatctctacacacacatgtgtacacacaaacaaacaaaagcaagtttctttaaacagcaaagttcacacaccagtccctgtcgcctggggtttttaaaacagaagtgaattgctaagatgggtttctgccatcttctgctcgctcacccacagtaagcccacagtgaggtgagaagctaaaggcagaacacggttaagaagtggcacctctggttctctctggggtgtccaggctttggggtgaccctttctttggtcggctgaccatgtcacattcactggtcagaagggagccagtattctagcagggtgcctggctaaacagtccctttagtggcctttgcaagagcatgactgtctaatgcagctagtgaaaagaaacaaccgttttatcagggaacagccagannnnnnnnnnnnnnnnnnnnagggctttgagagggcaggggtgtgctcagggagcaggaagaagtcatgacatgctcccccgcccccagtgctgtgatccttgcaatttctctgacaggatcataggtgtggaagggttttggtgtcttcttaaaggcaggcagggaggcaggccgtgttgaaagggaacttacctttcactgttcctcctgtaacctgaagctaacaactgaacctgtaacctgtaacctgtaacctgtaacctgtaacctgtaaccctgcgcagcttctcttgcccgatggcgtggctgtcctcagagggtgcagccgagccattgctggatgggagctttctagctctagcataccttcctttctgagcaaatgccaaacacctcgcccactccagagcttcagcagcaaccttgtggccagtccccagctgaaggttttcagcggtgccttcatgccgggttcatcatctcctaggcaacttcccagtgttgacattcccaaaaaaacagctaggcttgacccacttgaccttgaccttagtgagctttagaccatccagtgactctagtgctcctgggtgtgcatgtgtgtatgtgtgcgtgcatacatgggtgcgtgcatgtgtagtgagcatatgtgtgtgcattcatgtgtgtgtgtgtacatatgtgtatgtgaatatatggggagtgtgtgtgtatgtatggggagtgtgtgtgtgtatatatatatgcatgtgtgtgtgtaggtatggtgagcgtgtgtgtgtgtgtgtgtgtgtgtgtgtgtgtgtgtgatttgcattgaaaccagaggttaatgtccagtgtctttctcagtcactctccaccacactttttgagttgggaaatcttactaaacctggaatttatggccttcagctagactggctgaccagtgatatacagagatccaccactcccacctccccagtactagaattacagacatgcacccctagcttttacaggggtgctagggacccaaagcccggcctttatgcacattgccaccacagtgcccagccgtctccctatcctcacttttctaaatggttgtaaaggtttttttaatgtgtatgctagaggtcttcatgtatgtatgtgtactgagtgtctgcatgtatgtatgtgtactagactatctgcatgcatgtatgtgtattagattatctgcatgtatgtatgtgtactgagtgtctgcatgtatgtatgtgtactagactatctgcatgcatgtatgtgtattagattatctgcatgtgtgtatgtgtactgagtgtctgcatgtatgtgtactagactatctgcatgcatgtatgtgtattagattatctgcatgtgtgtatgtgtactgagtgtctgcatgtatgtatgtgtactgagtgtctgcatgcatgtatgtatgtatactagactatctgcatgtatgtatgtatactaaactatctgcatgtatgtatgtgtactgagtgtctgcatatatgtatgtgtactgaatgtctgcatgtatgcatgtatactagactatctgcatgtatgtatgtatactagcctatctgcatgtatgtatgtgtactagactatctgcatgtatgtatgcgtacctctggagctggagttgcagtggttttgagccttgtgagtgataagaaccaaacccaggtcctctgcaagaacaggaagtgctcttaatccctgagtcatctctccagccctggccctattcatttctcctattcctcaagcctgttactaatgcttctttgtattagaattcctccctttgctgttggaatcactgcgtgggttctgtctcctgattcttgtgctcacagccctcacacacaggcttccagggtgcctcagacagctcctcgcctccacctccatgtgtgtcttcctccacaaatccttagagcatctttagtcacttcctctcttgaatatccttgtattagcagggttggcttaagaaaacagaaaccgttccaagggtttcaagtcggaagagatttgacacagggacattcgtgctgaagtctcggcttcttcatagctgtgtagctgtggccaagtcactgggtcccttcctaacacagtttctacctctagagataatggtagtgcccaactcataggctgctgagagacctaagtgcaaatcaccatgagaaatctccagcatatagtttactgcccactaactgcaagctatcggtatggttaccattctaaccctctaaactgctccagcatggcagagcaaggtacctcaaagtcactgagtccatagctgaggtaaccgtgtgtgtgtgtgtgtgtctgcttcaacaaagagatgtcatctctgacggaagaacagactagatgaccttgaatggtgtgcaggtcccaaaggacaatgtgcttctaagatgacctgtccttcaggtctcgcatcgtcacctcctcacctgcaccgagcagatctctctcctctgagcacaccttgaaattttaattaaaatataatacatgcacatttttcaaaagtcagaacacaaatggcacagctagcaagaaaataagacctcctaccatccccaagtctggtccttcagctctttcaccccacagccatcatgaaacagttgctctgggggtttttccagacatgttctagacatgtgtgataaactcaatggattttcatatttcagtacacataggtagctgctttggcttttctgatttatcctcctttgagtacaagcaatttgtttaaacacagcttccttcttttctcacatgccactctttagagcactgctttgctttgttatgcctgagacagtatcttattacataggccaagatggtccttagctctcagtggttctgttacaacctccaaactgctgcaatggcgggcagtctgctgctccggcctctgcttagcagcattggtacggatgcaacaagggctatttaatcagctctgtctgattcttgctattacaaataaggttataaaaatcctttatgatgcaccaagcttttcctttttatgacgcagaaaacatctcatgtcttggagttattgcctccaaagaccacctttatggtcttatattgaaaaccagggctgcaaaatgaacccccccccccatgaattccaacccagggccaaatagccgcgctgtgctatccgcccagcttccccgcacggtaggcagtagtgatcgtacctgctttgcattgcctcaagggcatcctgggaattggatgttcttgaaagctcaagagttctgtcctaaaacatcaaattctgggccaatcctgcaattgacacacgctttctgctgtgtcctatgccttcagcatgctgcttgcccgaccccttcgaagagccactggcctgcctgtagctcccactgcttggcagctaaggctgccatgctcctcatgcccacccttcgggtctcacaccacagatgaaacaggaacagggctgggcacctctctaaggccacccagccaccacccttgaaatgaggcaaatcacaagtgaccaagggtccctgcgtgatgttgattcttttcacgtgtggctttactaagagggcccccctccttcttctgagctcaatggaagaggaagaggtgattcccatagtgctatgactctcaaaaaaaaaaaaaattccccagcgtatgggactcacttctccaactttggggcaattcataaaacacgggcggtgacagatgcatccagagagaagaaatgacgctctcagcgtcattaatgaattagtggttaactaatgcaactccacggatggccaccttcttgagcaagaacagacatgcagggatggaaatggatggttatccagcgggcattccccaccaccccccgccacctccccgagagtcatagcctgggtgcagaaacagggggtccctgtggcaatctgggtagccgactatccaaaccaaccaactcctggctcagtaagggaccttgcctccatagatcaggtgcagagtgatgtagaaagacacccacacacatgcatgtaaacacacacatcatactttacacgtacacatacacagaaaggaagttgtttacagattttaacttatgcaccatgtgtctgcaggtttgttggtgtccacgcaggccagaagagggcagcagatcctctggaactggagtttcaggaaggtatgggctgcccggcaagagtgctgggaactaagttcaggtcctctgcataagcagcaaactgtgagagcagtcttaacagggcaacctctccagctccaaaagggtagatttgaattctatttcacgccatagcaaagtcccagcaccatcatcttcatcatcatcatcaccaccaccaccatcatcaccatcaccaccaccaccattattacactaattgtggtggcaatcattccttagtcctgtatggaatacatcatttcctttgttagtactgcactgtagtgagttgtctttctcacttttcccatccataagtgaaggcacgaaacatcagattcatagaacaattctcttggtcacacagctgataataacaaccgagtccggactcaaatgtagcatgctctccttccacactgtgaccctgactccatctattgaaagggttttgttaagtgtgtttttataaacccaaagaagacaaagtctacttccggtctcccggcatcctctcctccactacacactcttcctgggatttgcaggtcaggtcatactccttccccagggagaggatttcttggatcgggtggctcaaccagctgatgctgacagtcggtgttcggaaggctaggcattaggatgaaagcagcagcagtcttttacaacgcggagacagaggctctgatccagcctgtagtcattcgctgtgcgctcaacatgacttgggccaaccctagggtgcttcgtcggctgaatggccgtaatttataggtctatttctgaaggtgtttttagaagacattaaccttgcaggaaacggagtaagaaaagcagactcccacccagtgtgagtgggcctcgtccaccgagatcttcagtaaaccaagatagaacggagaatgagactgtgggctttttcacctctataacctctcgagctgattcccacgtttctttcctgtcacctgtcactctgtttccccaggggaaccagcccaaggtttgtcgcgctgtgtcggcaccgtcttccctctggctcattgctgccctctgctaaagacactcgtcacattggattcagactgttgtcgtgacatcatttcaaggcggtcatttccatcaagatcccaccttcaaatacagctacattctgaggcattggggtaagactttaaggtcgggagaggaaacaaactcaccccaacataaactcactctatttaaaggagagcccaggagaatgggtttccacagttggattccggcaccattaggaggcgctctggtattcacgaagccctgtgggtaagagcccagccttcactgggggtaatttttttattacatatatttatttggaggtgtgtgctgtacacacacacaccacagcgtgcgtgtgggcaatcagttctctttttctaccgtgtaagcctcggggattaaattcgggttctcagacttgccgcaggtgtccacaccgctgaactatgttgctgcccctccaccttctgtcctcaccaagactcctcaaaggtgtcacagcctctcccaaaagtgccctggcaactggaatgtggccattatgaggatagggattgtgatggtggtcagaacctggtgaagccaaatggtattgtcttaaaagatgtcctgtggccctggtccgcagcacggtggttatctggatggcgatggaggacagggaggtgatggaagcccgaggggcaggagaaagctgccccacactctccaaggtggcccctgttgacagcatgcctgaaggcaagccaaaggcctctttggtaagaggacccctctcttgatttgccccatccatcccactgggggtcaggggtaaggggctctaagccttagagtctgctcacatgtgctagaagattcagttgacaagaagaacagtgtcccctatatccctataactggttcccagctgccaccggggaaccagaaaaactttacaggattgtaaaggttgagtgaaaactttgtctctgtctctcatttgaggcccttacttccctctgtggacaggacacacacacacacacacacacacacacacacacacacacacaaacaaacaaacatatacatatatatgtgttgcttggttctttcaacacctgggcttcttcctcactctggagctcctgaaagatctgttgtctgacagttaggtgaagggtgggggatgggaaaatgacctccagggtgataaagagtagacctgagcagacaccttcctgatccaccaatgcctcacaacttttgggcactcgcccttcatgggagttcaccttcccctgttatatacacttctagcaaacaccccgtctaggtagtctttgcaacacaccccaggctcctgaagctcggagcagagggtgtggttgtagggagccccacactgactcccccattatcaccccacttcttctccatcccaggatgcagaagtccccaaactagaactgcctaccctggaagagaacgggatctgtgaggacagagattgtccggggccccctaggtcattgcctccaaagtccggcccaaacgccaagggtcaggctggcgatggacctggactggagtccgtagagctgcccctgcccctggagacagaacaccgcaacgcgatggagctggagaaggtgcgcatggagtttgaactgacgctcctcaagtacctgcaccaggagaacgagcggcagaggcagcatgaggaggtgatggagcagctgcagcagcagcagcagcagcagcaggctttgcctcaccaggtagcagagtgggctctgggctgtggctgtactggcttggctatgcatcttgtctgctggtcccaggtctggctgagaggtggtgagcatcatgtagctgcctctacccactggtgcctggatcggtttgcaggatggcctgagaccactgcccctgtgattagcttccctgctatgttagattcaagcctctaaagagagttgagagtagaagatatcctgaaaccacatcctctacccagaatcccttttgatggtctcttcgtgtccaatactcatactatgacaggctttccgccactgtttttaaaaagttattttaagatttattatatataaatctgtgttctgcctgcatgtacacttgcatgccaggagagggcaccagattgtaggtggttgtgagccatcatgtggttgctgggaactgaactgacctctggaagatcagccaaccctcgtaaccttggagccatctctccctcccctttccagtacttttatttctaagatgttccagtcgttcctgtcgcctgactattgaatgataacagaaacctatcctttttttatccgttttctctgttggacacatgaccttacttattagaaccaaccaaagcaacattctctttacaagaaatagatgctcagcccctaccatgctacatggagacaagagtgctcatctgagggatggggtctagctcagtctgcagagtacttgagtagtatgcatgaagccctgggtttggtctccagcatcaactaaacataagtagaggcagaataatcagttcaaggtgacatggtaagtttgaggcaagactgggctatgtgagaccttgttttaaaagaaaaattggatggaatgccacctggggtacttaacactgtggccagactattctaaacaccctgtgatgaaagatgtcaccacttaaaagaagtgcctcctggtctctgaagtcataggttctgggtaaaaaaactcaggcgctaagattttgtttttaaaccacttaaccttgaacacattgctactccccctcgagctttggtctgctcatcactaaagtagaacctgtctcatgggtcactgtaaaggatgagagagggagtgcgtggacgctgctcttcagtggaccagcacatgagataagcgctcagtaatcgctagctattaccatttttatgaactcacgcagttcactgcttgacccgagtgcaacgacttccattcatcacttctcggtctccttgggatatgatgcatcagccccacttcccagctctgagtcagcctggattctgagaaggttgtcatgatctcagctacggctgtaactgttgagaagggtgtgacctaaagttaaatcccattgcagatctcactgcaggttatcagcggctccacccatcagtgccgcaccgatacattctctcctgctcacagttctgcagcatgcccaagaaacctgtcctgagccctgtgtcgggaggcttccaagaataaggaactgcactacctgaatcatttgtcttattgattggtcaattcttcaaagagaagataggttggtctgacaggacttgtcctccgtgaacacatgatggcttactaattattctttcataagaaaaaaattttttgtaaaaaaaagcacagatacctgcttactatacataaaaaaaaatcactgagccaagccaagcttactgaattagaacatctgaaatatattctccttcttctaatatctagaaaacatttgcctttctctagaatactcatacattcctgatactttccaattctccaagttcttagatttttgtcagtgtccaagaaaaaaattgagccataaactatttaaatcaggcatggtatttttattagtttgcctggttgctgcgacagagtccctgaagaacgcagcttaaggaagagtcagttttggctcacagttccaggggacagtcgtcacagcggcaggagcagcaggcagctgctggtcacactgctttagtcacaggcgctcagataactcagtccagaaccccaacccacctgatgatgctgtccacagttggggggagggggtctgtccatctcagttaacctaacctaatctagataacctcataggcacactagaggattgtcacctaagtgactctaggtcctgtcagattagcagggaaaataagtggtcccagtattgtaaggaccacatctcccaatatttctccttgctggatgaaaggaaaatccttagcattgactcttctgcctttttaaaagatagaccatgagaagtgttttgaaaaagtctacaaatatgtatttgtgtgtgcacgctcatataacacacacgcacacaccacacacacacacgcacacaccatacacacaccacacacacaccaccatgatggcttcccttcctcattcaggctaacaacatataggctggagagtgtggtggaagtcaacatggagccctgaccacagagcgccccgtgtagaggacactggacactccggccttccattgggtgtcctccgtggcagccacatagctgaaatcactctcccctccttagctttgtttcttgatatagttgccttctcattttttctgcatctgttttcagcaataatgtattcaaagtctgtacccttgggaatggtttaccaaagtgttttatttgtgattcatttactaaaagggggtgaaactggggccttggcttggttgtggaaccttccataatctctttttcttagtgattggagggaaagagaagagaaagtgagatgaatgagtggatgaataatttaactataatgaatttatctggactagtatttgtcactagtttggggcatctcagtccttgccacttagcattaaaaatatgacatcctaaaaactactgtagagcagaaaccatgccaagttctttagttcagattaaaatgtttatatcagtttttgcctcatacacggataacagttaaaatagggtcggtctgagcccagttattgacttcagaaaagaacaactcacaatcagatctgtctaaaaccccaacaccccgtggagtcaagagggcccatcactctaaccatctgccccaggaaagagcctctacccaagggtggagggctacggactaaccatgtgacatacgtgaggacttgtgctaaggcatgccccttcagagtgccactgtccagaaagctagcctatgaggaaacaatatccaaaaaatatttctaagatccagagcccagatctgggaaaaacctgcaagtccttgagagctttctcacatgggtaaccccagggcaaaatggagccgagaaagggcctcggtggcctagtgcctgggctcacaagggagaacacaagcccaagagagaaaatgcaccagtgatctcactagaaatatcttcctttattttctccttcctcgtgctcttgggaaggaggtctcactacacagggacttccatgaggtcaccccagagttcaggacaggactgagtccagctgtggtattgctagctctgctctcttctttcccacagttctcaggaagcctccaggacctcttgctcccccagaaccaattcgccatgttcttctactgcttcatcttcatccacatcatctacgttgccaaggagacggtcttctttctcttctccaagcactacctgttctgtctggcagccatcttgctgtgcttgattaaaaccttgtggtcctacttccaagtgtcgctgcttcgtccatcgcctacagtgccatctgtgtgttcacaaacccctcccctcccatcgaaacccggctcgatggcacagctgccagctgtggacacctgagcatggagatgcacagccaggacccctgtctcctccccatgggagaacttcagaagttagcaggtttgagggagggtagataatcaaggagggcccagaaaacctttccagagtcagagtcacatccgtgaccaaggttggatcccaacacatcccatgttcacaccggtttttcttctcctctaaattgcgaggttgacatgagcccctcccccaacaaaaatgtccttgtcccaacccccagaatcctgaagttgttgcttcacgtgacaaaagaaactgttgttaaagctgctatttaagagcctgcatcctggaagcattaacagactgagttctgccacatgccctcctccagccacttaggcaatagtgaaaaacagagaggggggctgtgttcagtgtggctacaccagaaagaggggcaactctggggtcctaacacaaagggtagatttccatagagagccaaggctgtacacaacaaagcagccctgcctgcccatcatccctggcttagctagtctctcctacaaggtctgaaaattgtatgaattctctctccaggagacaagttctcctgagctgggcctaggtttcagctttcgtctcctgataggagactcctagggaaatctcagtttcttgtggtctgttgtttcaggagtctgacagccaaaggggtggagcacagatgtctctgggtttagaatatattcattcctgccactacagttacagtgctgagccatgctcaaagaaccttgctgtggaaagggaggctgggttatctaggtagtcccaatgtcatgacagacatgaggagcaatcccacaggctgagagcactgcaggaccacagtcagggcagccagagcttccctgggcaagacaagcaggaaatacagtcacacccccaaacacagagaggaggggggtctttaatgtggctgagactgcaagtaactgagcccagagggagtcaccactgatggtttactgggaaaaaagatgggtggaagaaaaaaaaataccagatacacagagctcaacacaacatacacacacatgcacacatgcacgcacacacaggcacacaagcacatcaaacacacaagactattaaaaatgtagaaacaagccgggcagtggtgacaacagtctttaatcccgtcactgggaaggcagagggcagttggatctctgagttggaggccagccgatctaaagagccaaggctatgcagagaaacctagtcttggaggacggtgggccgaggggagggggagtagggaatgggataaagggtgaggagggcggtagataccaacacagagacttacacagatcatagaacacagtttcctgtagagggatagtctcaagcctgcaaggaaacaggaggctcgacctgagcccagcagcaaaattgcaagatacacacaaaaaagaaaaggatttcagcttctcctacaactccccctggccggcccaccgttcctccgttcctccaccatacctctctgtacagactgtcaactgctctgtttccacctgcccaggcattgagatgccagccagtgctagcactgagattcacacaagggagaaagctcttggtgagtccaccctgaccttcctcccctgtcacagagcttggctgggttctgtgacacttggtgaaacagagaagactatctggggaccacactgtcaggacatattagcctgccatttacgtccacagtgacctcccatcttccaccgagtccggtgcacccatccccacttaaggctgtgtgtgataggcacttataacttgcaaatggtaacactggcatttctcattaaactttcagtgatggaaaggcttgctatggggtcaagtctcaagatcgtttatttgattcaggtttctggcttgagactgaggcaaagattaggagagcaaattgtcacaggcccatctattcatttgtcacagacagaagtgggcaccaggttaaaaaaaacagaaagtcaaggccaccctgtcactcttgttgtctggcagtgctggacctaaatattttggtttatctaagaggaagacggactctgtgaagtcaccggattagcatggcacaccctgggtaatagatacaaactctctttcccactgcccagatctagtgcctaaagactaagagcaggagttaggacctgactctaagttgaggatcttaggaagatccagctctgcacacaatcaccttccaaattaggacaagtctccttgttgaaattcgaagcagacaatccggaaagacacagtcacaaagggcaggaaagaggcacagctaaatggtaaccaacctagcaacaagtcaacacattagcagctcttaagtgcctccgatgccaagtatccagtgcaatgcttaaggaggccagcttgccaagggaggcagggcatgcattaaaaccttcttgcagagaattccaggctcagagaagtcttaccctgaagcacagactcttcccaggtccctacagtcctgcctgctgaggcagctttaacacacaagaacactagagatcacttacagcctagagaccccaggaatgaaggggactgggttggagactgaagccttcctgtaagagcagcccctggagggttaggaaacctgggcaggtgagtgagaaggagaagggaggatgcacacagggatcatcgtagaaggagaaggcatggcgtgctccggctcagatgagtgctgcaaatgctgacaggctggacaaggcctcagccttgtttcgtggtcttgaatgctggtctcaggaatatgaacttgatcctttgggaaactgggagccccgaggcttctaaagaagtggcaagagagaggcttcccctcccccaacccctcccagaagtctggaaaccatactcgccttgaccccctcctcccatttctagtccagacacgttgttctagaggttcagagtgtgagtattataggcagctgttaaaaaacaaaaacaaacaaacaaacaaaaaccagggattgcagcttaacttaaccgaggtctgtgtttgtacagaccaagaagttcatgtggtcagcccaagggctcaaacttgctatgaaatgacagaggactctggctccagactgcccccactgtcctcgtgctaacagctttcgtttatatgctgtggctgcagcccattctctcatggctaccacagctccaggcaccaatccacaggcagagagcaggtggggagaaaagcacagccttttggtttggtttggtttggtttggtttggtttggtttggtttggtttggtttggttttttgagacagggtttctctgtgtagccctggctgtcctggaactcactctgtagaccaggctggcctcgaactcagaaatccgcctgcctctgcctcccgagtgctgggattaaaggcatgggccaccactgcctggctagcactgccttttgaaggctgtccaaactgatcgagggcgcgaggagagggcgagagccttcaatcccagcacccaggaggcagaggcaggcaaagctctgtgagttcaaagccagcctgaactacatagaacttgtctcaaaatcttttgtaaaagccaacaacagcaaaacaaaacaaaacaaaacacacacacacacacacacacacacacaaaaacaaaaatacttccgaagaagtcccaaccagagatttctgattgcatctcattggtcagatacaatcacaaggctgcttctagctacagggcttctgagaaggtaaggttttactatagggagcccaccagagattaccactcagacacactgttgtagacattatttaaaccctgccccaccttaatcatttagttcctggatggaagagtacataaaaccgttatatttacaataaaccttaaacagcataatagctggacaagtatctggctctatgctactagaatctactttcctattgatctatagatctattgatctactttccaattgatgaactgaattattattactacttactatgtttcatctgggctgttcttaattccaattggccagcccacagagccacatcttcttgagtcctaagccatggcaacatctccctcatctatttaccttcctctcctcatggctcttctctaaccccaagcctggaaaacctaaatcccacctatgtctcttctgcccaactattggctgttggcatctttatttaccaggcacaataaactgggggcagggtcacttagctagcatttttgtgtggactctctcatctcttgtctctgggacaaccagttttgggggggggagggcccaaattagcgttacaatacaagcagcatgctggtcgatctactatgcacattttataaacaattgaaagtttttgttccagctggaactatacttgggtattcagaaacccaagtatagcccagggcctttagaccaaggattggtttttaaaaaagcaaaacccannnnnnnnnnnnnnnnnnnnaagcaagcagtttaacagaagctaagataagcagttagctggaggtggagttttgcacaagcaggaagtttaacagaagttaagataaattagcgggagcatctttaaccttgggttcctaaaatagggttgggtaattttccatgggattcttcatcaaggaaatcaaattctggttaaaactgaaatggccttagcaagaatacaagacagaggaccttctgccctgtcacagtttttacctgagcacttttgcagccttaaacaaaactgggattctgataggacaagggcaagggttagtagctgcataagaacttgttgcccaccattcctgctttagcaggccagagttcctgagtcagagccttggttggttgagacaggcaggtggagcatggtggcagccgatcttggcctagccccatgctgtgtccacccgaggaaaggcacaccaggccccaaccacagtcagtagtggacagctcatggcttcacccagacgcatgcatgcctagatctgacccaacatctatcaccagggcagcagccctgcttggggacttagacaggtacgttcaaggctagagtctctcttcttcctgatctcagatcccacagaacagagccaactgttggtcgggggatctgagctatggtcctacacccagctgctaaaggttgcctcacaaaaaagaactcactaccaaggtccactccgctttagcccaaataaacaaagccctaacaacatttcaaataggcataagaggagaaagacaccagtttgtctccctctaaatagaatgtcatcgattgccaacccaagtccaaggataagctagagctaagagactactgtcgtttactggaggggaaggacagcagacacagttctaatggccacttccctcacttttttctgttatcacccctgctgaacaggtgactacaagtcctttaattttcttgggtatcattgaagtgacgtggaaatatctagaaactcagtgagaaaaataaaggcttattaactaatataactaattaattaatacagcatctggttcagttgacccagatatgattgtatctagaggtgactttcagcatcagtggagctgggggactccatatagatatggcttcctgggtcccatcccaagtcctgagtcagaaacattgtgataggttccaccccagccaggagcctgctgcctaggctgaggctccattcttttctctgactgtaaggccctgttgtggacctggaggactttccaaagggataaaaggacaaagatagaaaatgaggtgagaagaggaactgagtgtgggtcctaaaagtgctgtgggggcctccacctccacctggcatggtcaaacgctagccagagtgggtagcatggccgcaggacaccaccgtcagtccctcctccctctgnnnnnnnnnnnnnnnnnnnnnnnnnnnnnnnnnnnnnnnnnnnnnnnnnnnnnnnnnnnnnnnnnnnnnnnnnnnnnnnnnnnnnnnnnnnnnnnnnnnnnnnnnnnnnnnnnnnnnnnnnnnnnnnnnnnnnnnnnnnnnnnnnnnnnnnnnnnnnnnnnnnnnnnnnnnnnnnnnnnnnnnnnnnnnnnnnnnnnnnnnnnnnnnnnnnnnnnnnnnnnnnnnnnnnnnnnnnnnnnnnnnnnnnnnnnnnnnnnnnnnnnnnnnnnnnnnnnnnnnnnnnnnnnnnnnnnnnnnnnnnnnnnnnnnnnnnnnnnnnnnnnnnnnnnnnnnnnnnnnnnnnnnnnnnnnnnnnnnnnnnnnnnnnnnnnnnnnnnnnnnnnnnnnnnnnnnnnnnnnnnnnnnnnnnnnnnnnnnnnnnnnnnnnnnnnnnnnnnnnnnnnnnnnnnnnnnnnnnnnnnnnnnnnnnnnnnnnnnnnnnnnnnnnnnnnnnnnnnnnnnnnnnnnnnnnnnnnnnnnnnnnnnnnnnnnnnnnnnnnnnnnnnnnnnnnnnnnnnnnnnnnnnnnnnnnnnnnnnnnnnnnnnnnnnnnnnnnnnnnnnnnnnnnnnnnnnnnnnnnnnnnnnnnnnnnnnnnnnnnnnnnnnnnnnnnnnnnnnnnnnnnnnnnnnnnnnnnnnnnnnnnnnnnnnnnnnnnnnnnnnnnnnnnnnnnnnnnnnnnnnnnnnnnnnnnnnnnnnnnnnnnnnnnnnnnnnnnnnnnnnnnnnnnnnnnnnnnnnnnnnnnnnnnnnnnnnnnnnnnnnnnnnnnnnnnnnnnnnnnnnnnnnnnnnnnnnnnnnnnnnnnnnnnnnnnnnnnnnnnnnnnnnnnnnnnnnnnnnnnnnnnnnnnnnnnnnnnnnnnnnnnnnnnnnnnnnnnnnnnnnnnnnnnnnnnnnnnnnnnnnnnnnnnnnnnnnnnnnnnnnnnnnnnnnnnnnnnnnnnnnnnnnnnnnnnnnnnnnnnnnnnnnnnnnnnnnnnnnnnnnnnnnnnnnnnnnnnnnnnnnnnnnnnnnnnnnnnnnnnnnnnnnnnnnnnnnnnnnnnnnnnnnnnnnnnnnnnnnnnnnnnnnnnnnnnnnnnnnnnnnnnnnnnnnnnnnnnnnnnnnnnnnnnnnnnnnnnnnnnnnnnnnnnnnnnnnnnnnnnnnnnnnnnnnnnnnnnnnnnnnnnnnnnnnnnnnnnnnnnnnnnnnnnnnnnnnnnnnnnnnnnnnnnnnnnnnnnnnnnnnnnnnnnnnnnnnnnnnnnnnnnnnnnnnnnnnnnnnnnnnnnnnnnnnnnnnnnnnnnnnnnnnnnnnnnnnnnnnnnnnnnnnnnnnnnnnnnnnnnnnnnnnnnnnnnnnnnnnnnnnnnnnnnnnnnnnnnnnnnnnnnnnnnnnnnnnnnnnnnnnnnnnnnnnnnnnnnnnnnnnnnnnnnnnnnnnnnnnnnnnnnnnnnnnnnnnnnnnnnnnnnnnnnnnnnnnnnnnnnnnnnnnnnnnnnnnnnnnnnnnnnnnnnnnnnnnnnnnnnnnnnnnnnnnnnnnnnnnnnnnnnnnnnnnnnnnnnnnnnnnnnnnnnnnnnnnnnnnnnnnnnnnnnnnnnnnnnnnnnnnnnnnnnnnnnnnnnnnnnnnnnnnnnnnnnnnnnnnnnnnnnnnnnnnnnnnnnnnnnnnnnnnnnnnnnnnnnnnnnnnnnnnnnnnnnnnnnnnnnnnnnnnnnnnnnnnnnnnnnnnnnnnnnnnnnnnnnnnnnnnnnnnnnnnnnnnnnnnnnnnnnnnnnnnnnnnnnnnnnnnnnnnnnnnnnnnnnnnnnnnnnnnnnnnnnnnnnnnnnnnnnnnnnnnnnnnnnnnnnnnnnnnnnnnnnnnnnnnnnnnnnnnnnnnnnnnnnnnnnnnnnnnnnnnnnnnnnnnnnnnnnnnnnnnnnnnnnnnnnnnnnnnnnnnnnnnnnnnnnnnnnnnnnnnnnnnnnnnnnnnnnnnnnnnnnnnnnnnnnnnnnnnnnnnnnnnnnnnnnnnnnnnnnnnnnnnnnnnnnnnnnnnnnnnnnnnnnnnnnnnnnnnnnnnnnnnnnnnnnnnnnnnnnnnnnnnnnnnnnnnnnnnnnnnnnnnnnnnnnnnnnnnnnnnnnnnnnnnnnnnnnnnnnnnnnnnnnnnnnnnnnnnnnnnnnnnnnnnnnnnnnnnnnnnnnnnnnnnnnnnnnnnnnnnnnnnnnnnnnnnnnnnnnnnnnnnnnnnnnnnnnnnnnnnnnnnnnnnnnnnnnnnnnnnnnnctctctgagcaagtctactggagctttggatcctggagttgccagaaccatgaatgttgaggctgtacatcccacccaatttctgggtccagcagtaattccacaggggggtggggaagaacaaaaaagggcaaggggagtctggtcaagagcctgggagctcatagtgtgacagcttgcaagggggcatcttgtccaagttcttccagtatgtttgctctgtgcagtgcactccttgggcgggtcactccgtggctacctagtcttaagctgttcagatcgccacaacaaatcgcacaggtagcttaaacagcatgcgtttcacccagttctagaggttggaagcctcagagcgaggtgctcttcccggtctgagcttctcctcagacctgggcttacagatggctttcctctgcgtagacacaacccaggtgtccaacatgtctttgttgcatggctctttctgggaaaacatagagatgtctgaccatcccaagtactagagaggagaaaaagaagaactccattgaagttcggcccggtggattaatgaatttattaggatggtttgcagaagcagctatgaaaccctcagaagatgtcccgggttatttataggaaggtaaacccttgagacatcccacctcagtcaaccttcgattcttagataatcttagggaggagcagagcctctgaaggtctccccaaggttgcctgagcctccagacttcctgcagtgtgctcacagcctgacaccatggagggcttgagtgcgtcttcgtaactgcagtgccttaatggtgacgaaggccatggccatggaggaaatcacagtaagggtgtcactcacacgtcacagaggcctcatcttagttacatctttaaaagccctgactccaggggccagagatacaggtcattcattcagtataaaacatttgccttgcaagtgcaaggaccaaagttcagtccctagaaaacagtaacaaaaaagccagacgtggtgacacacacttataatcgtgcttatcacagcagtggaaagacaaaaacatatcacatacatacaatcctcagcacacatacccagcacatactacatacaccatatgtatagacataccacacacatcaaacatacaggcttatgctatacacacacatgccccaaacatacagacatatgtcacacatacattctactcaatacacataccacacacatgcatacatagcatacacatttatacacactattgcctgctaccacacacacataaacatatcatacatataccacacaaacattttacatacacacacacagtacacatatacacatatacccnnnnnnnnnnnnnnnnnnnnnnnnnnnnnnnnnnnnnnnnnnnnnnnnnnnnnnnnnnnnnnnnnnnnnnnnnnnnnnnnnnnnnnnnnnnnnnnnnnnnnnnnnnnnnnnnnnnnnnnnnnnnnnnnnnnnnnnnnnnnnnnnnnnnnnnnnnnnnnnnnnnnnnnnnnnnnnagccaaattataaacttcagatactaaatgctccaagttttaaggcttgctaatcgtgctggacttccatactgttttcttatgtcttgtatcatgcagtaataaaaacaattccactgagttaaggtttggaacaca

SEQ ID NO: 246 - DNA, 676 bp, Mus musculus
ttgtcttaaaagatgtcctgtggccctggtccgcagcacggtggttatctggatggcgatggaggacagggaggtgatggaagcccgaggggcaggagaaagctgccccacactctccaaggtggcccctgttgacagcatgcctgaaggcaagccaaaggcctctttggatgcagaagtccccaaactagaactgcctaccctggaagagaacgggatctgtgaggacagagattgtccggggccccctaggtcattgcctccaaagtccggcccaaacgccaagggtcaggctggcgatggacctggactggagtccgtagagctgcccctgcccctggagacagaacaccgcaacgcgatggagctggagaaggtgcgcatggagtttgaactgacgctcctcaagtacctgcaccaggagaacgagcggcagaggcagcatgaggagttctcaggaagcctccaggacctcttgctcccccagaaccaattcgccatgttcttctactgcttcatcttcatccacatcatctacgttgccaaggagacggtcttctttctcttctccaagcactacctgttctgtctggcagccatcttgctgtgcttgattaaaaccttgtggtcctacttccaagtgtcgctgcttcgtccatcgcctacagtgccatct

SEQ ID NO: 247 - protein, 221 aa, Mus musculus
CLKRCPVVRSTVVIWMAMEDREVMERAGESCPTLSKVAPVDSMPEGKPKASLDAEVPKLELPTLEENGICEDRDCPGPPRSLPPKSGPNAKGQAGDGPGLESVELPLPLETEHRNAMELEKVRMEFELTLLKYLHQENERQRQHEEFSGSLQDLLLPQNQFAMFFYCFIFIHIIYVAKETVFFLFSKHYLFCLAAILLCLIKTLWSYFQVSLLRPSPTVPS

SEQ ID NO: 248 - DNA, 24861 bp, Homo sapiens
cgaggctgctgtgcactgtgccgtatcaccctgccctccccatccttccacttcaccagactgaactgggctgggcaccttccccatctgataatgatcctcatcatctgttgcctctatgtttcctctctgcccttcccctaggaggcatacctccatgaaactgcattaattcattaaccaaaacaatacaaagcaacacagagtctagcattctcattttcctgtctctagataccagtccttcagggaattttccagaagttgagaagactggttgcatgagccttgggttggtttggcactcgtgacagtgtgaaaagagcctccgcctcctccactgagctcagagaaaggtttatagtaaagccatttgcaggggtaagggagacaggatcacatggtagcccaataacaggcttccctagaatgaaaagctctgtcccagtagagataagccaggttattctgattcctgcccttggaaaggtctaccaggaaatcatgagtgacttaagtaggacaaacaacacagaaggcataccgagaggccatacagttgaggctatgaagaaccattagaagctgaagttatgagtaagctgaagtcaggaggaagcaggaaccttgcctacagtgaagtatgaggttggaggttgtgggttgacgggggtgaggaaggctgttgatgggaagtgaggggacacggagaagcagaaacaccgaaatcagctgagttatacgaatgacaaggcacatgtgaagctgcaccaactctggctgctggtctcagaattgccctgaatccagcacagtccctgctaggccagctcatccctcatccctgttgctgggctcccacgtgttcttgtctcctttacccttgcatatggctttactatacacttcctttctctgaactcaacagagaaagcagaagctcttttcatactgtcaccagtgccaaaccgacccaaggctcgtaagacctgtttcctccacttctgggaagttccctaaaggacaggggtctagagacagggaaatgagaatgctagactgtatgttgctttggaatacattgctctgcttaatgaattagtacactttcatggaggtctgcctcctaggggaagggcagagaggagaaacagaaggcaacagatgatgaggatcaattgacactttactcatgctgatcctttcctctcacccaaatcccacccacccttcatgttccctcttccaccaaaccttcctcagttactccagccacatcaaccctgatcctttttttttttgagttagtcagactctgtcacccaggttgaagtgcagtggcaagatcacagctcacttaagtgggctcaagcgatcctcacacctccacctttcaagtagctaggaccccaagtacatgctaccatgcccagctaatttttttttttttttatagaggtggattcccactatgttgcccaggctggtcttgaactcctgggctcaagcgatcttctagactcagcctcacaaagtactgggattacaggcatgagaccctgagccctgacctcttgactcctatggtacattgcctgattggccccagttcttcatcccctatatcgagaccttttatctttctttgtggttcctcccactaactgggcagagtacgtttcaccatcctttgagtttccccatacaactggctttctccaataacataagatggaagtgatggtgtgccagctccaaggcctcttgtacttcttccatccccgagcaaagggtatgcctaagctaccccactattcccaagaggaagataagagacacatgaaacaaagctgcctcggccaagctcccccagttgaatccagcctaaatcagcctacctttagatgtctgagctaaggaaatgtttattgttgtgggccactgatcatttagggttgtttgatctatagctgacaactacccatagtacttattgtgcatttccatacttggtgatttaacagcagtggattatttgtacatatgtcattgtttctttaagcagatctctgctggttaagattgccaggtttaacaaataaaaatacaggattcccagttaaatttgaattacagacaaataactttttagaaatctgtcccatccaatttttagaacatatttatactaaaatttatgtaaaattcagatttaactgggaatcctgtatctatctggtaatcctactcctagtagtgcctgaggcaggatagatatcttacacaacagctgtgagatcatttacatggtcaccaccataatgttgggaggggaaagccatggttcagttaacgatttgcaaagacagaaagtgaaccttgagcattctcctctccccagtggcaaaatctactgctcagaataatggtgatcatggttatcttttgcctagtccctgtatgggcagcttgtgggctaaacaccctatctaatttattattatacttaagttctagggtacatgtgcacaatgtacaggtttgttacatatgtatacatgtgccatgttggtgtgctgcacccattaactcatcatatacattaggtatatctcttaatgctatccctcccccttccccccacccctcaacaggccccagtgtgtgatgttccccaccccgtgtccaagtgttctcattattcaattcccacctatgagaacatgcggtgtttggttttctgtccttgcgatactttgatgagaataatggtttccagcttcatccatgtccctacaaaggacatgaactcatcattttttatggctgcatagtattccatggtgtatatgtgccacattttcttaatccagtctatcatccatggacatttgggttggttccaagtctttgctattgtgaatagtgccgcaataaacatacgtgtgcatgtgcctttatagcagcatgatttataatcctttgggtatatacccagtaatgggatggctgggtcaaatggtatttctagttttagatccttgaggagttgccacactgtcttccacaatggttgaactagtttacagtcccaccaacagtgtaaaagtgttcctatttctccacatcctctccagcacctgttgtttcctgactttttaatgatcgccattctaactagtgtgagatggtatctcattgtggttttgatttgcatttctctgatggccagtgatgatgagcattttttcatgtgtctattggctgcataaatgtcttcttttgagaagtgtctgttcatatccttcacccactttttgatggggttgattttttcttgtaaatttgtttaagttctttgtggattctggatattagccctttgtcagatgggtagattgtaaacatttttcccattctgtaggttgcctgttcactctgatggtagtttcttttgctgtgcagaagctctttggtttaattagatcccattggtcaattctggcttttgttgccatcgcttttggtgttttagtcgtgaagtccttgcccatgcctatgtcctgaatggtattgcctaggttttcttctagggtttttatggtttcaggtcaaacattaaagtctttaatccatagtgaactaatttttgtataaggtgtaaggaagggatcctgtttcagctttctacatatggctagccagttttcccagcaccatttattaaatagggaatctttccccattgcttgtttttgtcaggtttgtcaaagatcacatggttgtagatgtgtggtattatttctgaaggctctgttctgttccattgatctatatttctgttttggtgccagtatcatgctgttttggttactgtagccttgtagtatagtttgaagtcaggtagtgtaatgcctccagctttgttcttttggcttagggttgtcttggcaatgtgggctcttttttggttctatatgaactttagagtagttttttttttctaattttttgaagaaagtcattgatagcttgatggggatggcattgaatctataaattaccttgggaagtatggccattttcacgatattgattattcctatccatgagcatggaatgttcttccatttgtttgtattctctcttatttccttgagcagtggtttgtagttctccttgaagaggtccttcacatcccttgtaagttggattcctaagtattttattctctttgaagcaattatgaattggagttcactcatcatttggctctctgtttgtctgttattggtgcataggaatgcttgtgatttttgcacattgattttgtatcctgagactttgctgaagttgcttatcagcttaaggagattttgggctgagactaaggggttttctaaataaacaatcatgtcatctgcaaacagggacaatctgacttcctcttctcctaattgaataccctttatttctttctcctgcctgattgccctggccagaatttccaacactatgttgaataggagaggtgagagagggcatccctgtcttgtgccagttttcaaagggaatgcttccagcttttgcccattcagtatgatactggctgtggggttgtcataaatagctcttattattttgagatatatcccatcaacacctaatttattgggagtttttagcatgaagggctgttgaattttgttgaaggccttttctgtatctattgagatactcatgtggtttttgtctttggttttgtttatatgatggattatgtttattgatttgcatatgttgaaccagccttgcatcccagggatgaagccaacttgatcgtggtggataaactttttggtgtgctgctggattcggtttgccagtattttattgaggatttttgtatcgacgttcatcagggatattgatctaaaattctctttttttgttgtgtctctgccaggctttggtatcaggatgatgctggccttgtaaaatgagttagggaggattccctctttttctattcattggaatagtttcagaaggaatggtaccagctcctctttgtacctctggtagaatttggctgtgaatctgtctgatcctggactttttttgcttggtaggctattaattattgcctcaatttcagagcctgttaattgttctattcagggattcaacttcttcctggtttagtcttgggaggatatatgtgttcaggaatttatccatttcttctagattttctagtttatttccatagaggtgtttatagtactctctgatgatagtttgtatttctgtgggatcggtggtggtagcccctttatcattttttattgtgtctatttgagtcttctctcttttcttctttattagtcttactagcactctatcaattttgttgatcttttcaaaaaaccagctcctggattcattgactttttgaagggttttttgtgtctctttctccttcagttctgctctgatctcatttatttcttgccttctgctagcttttgaatgtgtttgctcttgcttctctagttcttttaattctgatgttagggtgtcaattttagatctttcgtgctttctcttgtgggcatttagtgctataaatttccctctacacactgctttgaatatgtgccagagattctggtgtgttgtgtctttgttctcattggtttcaaagaacatctttatttctgccttcatttcattatgtacccagtagtcattcaggagcaagttgttcagtttccatgtagctgagcggttttgagtgagtttcttaatcctgagttctagtttgattgcattgtggtctgagagacagtttgttataatttctgttcttttacatttgctgaggagtgcttgacttccaactatgtggtcagttttggaataggtacgatgtagtgctgagaacaaagtgtattctgttgatttggggtggagagttctgtagatgtctattaagtctgcttggtgcagagctgagttcaattcctggatatccttgttaactttctgtctcattaatctgtctaaagttgacagtgggatgttaaagtctcccattattattgtgtgggagtctaagtctctctgtaggtctctaaggacttgctttatgaatctgggtgctcctatattgggtgcatatatatttaggatagttagctcttcttgttgaattgatccctttaccattatgtaatggccttctttgtctcttttgatcttcgttgatttaaagtctgttttatcagagactaggattgcaacccctgcttttttttgttttccatttgtttggtagatcttcctctatccctttattttgagcctatgtgtgtctctgcacgtgagatgggtctcctgaatacagcacactgatgggtcttgactctttatccaatttgccagtctgtgtcttttaattggagcgtttagcccatttacatttaaggttaatattgttatgtctgaatttgatgctgtcattatgatgttagctggttattttgctcgttagttgatgcagtttcttcctagcatcgatggtctttacaatttggcatgtttttgcagtggctggtaccagttgttcctttccatgtttagtgcttccttcaggagctcttgtaaggcaggcctgatggtgacagaatttctcagcatttgcttgtctgtaaagcattttatttctccttcatttatgaagcttagtttggctggatatgaaattccgggttgaaaattcctttaagaatgttgagtattggcccctactctcttctggcctgtagagtttctgccaagagatctgctgttagtctgatgggcttccctttgtgggtaacctgacctttctctctggctgcccttaacattttttccttcaactttggtgaatctgacaattatgtgtcttggagttactcttctcgagaagtatctttgtagcattctctgtatttcctgaatttgaatgttggcctgccttgctaggttggggaagttctcctggataatatcctgcagagtgttttccaacctggttccattctccctgtcactttcaggtacaccaatcagatgtagatttggtcttttcacatagtcccatatttcttagaggctttgttcgtttctttttactcttttttctctaaacttctcttcttacttcatttcattcatttgatcttcaatcactgataccctttcttccacttgatcaaatcggctactgaagcttctgcatgcgtcatgtagttcttgtgccatggttttcagctccttcaggtcatttaaggtcttctgtatgctgtttattccagttagccatttgtctaatcttttttcaaggtttttagcttctttgtgatgggttcaaacatcctcctttagctcgcagtgtgttattactgatcgtctgaagccttcttctctcaactcatcaaattcattctccgtccagctttgttccattgctcgcgaggagctgcattcctttggagaagaggtgctctgatttttagaattttcagcttttctgctctggtttctccccatctttgtggttttatctacctttggtctttgatgatggtgatgtacagatagggttttggtgtggatgtcctttctgtttgttagttttctttttaacagtcaggaccctcagctgcaggtctgttggagtttgctggaggtccactccagcctgatccttgctctagaagcttcatctcagaggggcacccagtggtatgaggtgtcagtcagcccctactgggaggtgcctcccagttatgctacttgggggtcagggacccacttgaggacgtagtctgtctgttctcagatctcaaactccgtgctgggaaaaccactactctcttcaaagctgtcagacagggacgtttaagtctgcagaagtttctgctgccttttgtccagctatgccctgcccccagaggtggagtccacagaggcaggcaggcaggcctccttgagctgtggtgggctccacccatttcgagcttcctggctgctttgtttacctactcaagcctcagcaatgacagacgcccctcccccagccttgctgccgccttgcagttggatttcagactgctgtgctagcagtgagcgaggctccgtgggtgtgggaccctccaagccaggaacaggctataatctcctggtgtgccatttgctaagaccgttggaaaagcacagtattagggtgggagtgttctgattttccaggtactgtctatcatggcttcccttggctaggaaagggaattcccccaccccttgcacttcccgggtgaggcgatgcccctcccttctttggctcatgccccgtgggctgcacccactgtccgacaagccccagtgagatgaacctggtacctcagctggaaatgcagaaatcacctgtcttctgcgttgctcacgctgggagctgtagactgcagctattcctattcagccatcttggaactccccctcctaccctatctaattttcacatcggtgctgcaacgtagggaagtggctaaatctttatcccatttacaaatgaatacactttcccttgatcacacagccggagagagtagcgaagctggaattcaaatgcagccctttgtctttccatattgcaatcctgctttcaactaccaaagatgttttgctgcttttttcacaaaatggaagatgacaaaatacattccccagccctccattctacccacgtggaagtatgaatgatgggttgtattagtgtcctaggtttgctgtaaccaagaaccacagactggttggcgtaaatgacacaaatttattttctcgcaatcctggagagtcagcatcagagatcaaggtgccagcagggttggttccttctgagtgctaggagagaaggatctattccaggtctacgatggttaattttacatgttgacgtcagtgagccattggatggccagatctctgattaaatgttatttctgggtgtttctggaagagattaacatttgaattggtggactgagtaaagcagtctgccctcctcaatgtgggtgggattcatccactccactgagggcctaaatggaacaaggcagactgccagttgaactggtgctctcaattcaattgcctgactacatgaggtgatccgtcagtcttctcctgaccttggactgggacttccaccatcagtgctcctggttctcaggcctttgcgctcagactggaatttataccacccgctttccagggacaccagcttgcagatgggagatcataaaacttctcagcctccataattgcatgagccaattctgtgtaataaatgtcattttatgtttctttggagaaccctaatacaatgccggtctccttggtttgtagatagccattttctcccttgtcttcacatcatcatcttcttacaaggacaccagtcatactggattaggatcccaccctaatgatctcactttcacttaatcacctctataaagaccctgtctccaaataaggtcacattctgaggtactgggggctgggagttaatacttcaacatatgaattttgggaagagagggggacctggtttagcccataacagggtttgtggagctgtgactcatttccaacacaatcttcatttaaaaaaggaacccaaggaaatggatttcaaatggtggaattctgagttgcatgagttggaactctagttttcaaagccatccttatgggcagcaaaggcccatcctgcagttcttaatgttagcatgttactacctcaaaggtgtcacaccctccaccaaaggggccctagcaacttgtagaatgtaggctatgatgacgacaggggattgtgatggtggccaggctgtggaatctggtgaggccaaatgtcagcacctcaaatgatgtcttgtgaccccacctggcagcgttctggttttctggatggcagcagaggacagggagatgatggaagcccggggtgcgggagaaagttgcccgaccttccccaagatggtgcctggtgactccaagtctgaagggaagccaagggcttatctggtaagggggctgctgtgtctcaccacccccgcctattccgtcagggggagcaagaatactgtaggaacacatgctttgagcttccagacaactgccaagaacatcaggtgacatgtaccccagccctgtaactggcaccagctgtcaccagggaccaggtagccctccataagattgtgaagtcatatgaagctgggtttggtctcctctatctacctccccacttggggtcctttccttgctgggtggataggacctggctccccaccatagccctcttcctggtccccaaatatttaggttctctcaattcagaccctgggtttctttctccctctgtaacttcctgaagacctggcatctaactgacctcaaagtcaggtagagttgaggatgggcccggaagttgcctctttggtgatcagaaaaatcactagaaaaatggacatcaatctactcaactcccagtgcctccacttgcaactttagggcactattactttgtgctagtttgccctctccttgacccgcaggtcctgacaactcccggtaagagcacttctaataagaattcagcctagatctttacaattcaaacaccccagtccactgcggcctggggctgcgggagttccatggggtcaggggcagccccatcctgactcttcaaggtacctcccctccctgcttcccctacgccaggaggcagagtcccagaagccagactcctcctatgactacttggaagagatggaagcttgtgaggacggaggctgccaagggccgcttaaatcgctgtcccccaagtcctgccgtgctaccaaaggccaggctggcgacggacccaaacccgcagagctgcccccgacccctgggactgagcgcaatcccgagatggagctggagaaggtgcgcatggagttcgagctcacgcggctcaagtacctgcatgagaagaaccagcggcagcggcagcacgaggtggtgatggagcagctgcagcgggagcggcagcacgaggtggtgatggagcagctgcagcaagaggcggcgccccgcctggtgggtgacaaggaacggggcactgggaggagggaggcctggagctgaagtcccatggggcctggagcaggcgcccaccttccctgctttgcgcggcaccccaccctgcagatcctggatctcggctgaaaggggctgagcatccactcgggcggtctccagccctctccgccttggctcacttccagagatgtctgctcactgccttaaagctcgctaccctacctggccagctctgttaaacagagcttccacgggaagctgagatgtgactctctaaggagagctgaggccgggagggtccccagaaccacatcgcccacccgacagcctttttggtagcttcaaggaaaagtcttcaacatttcctccctcttccaccgctcacaagtcctctctgcatctcttaaaatttgatgcctggagactagacccagaatccccactgcaccctggccagtggattttgatagaaccatcacctccccgatcagggctatgtttattctgttggatcatactgccttctagtcaactgaaacagccatcttttcacaagaagtacaccactgttccctaatctgtattaaatgggggataagaatgcctacttgagattaaatgggatgtgaagagcttagcacagtggctaggctatcataagcattcaatagtggaagatgttgtttaaagcagtgtttcctgcactttaaagtcagaaagtcctggattaaaatgccagttataaactccctgacattgggcaaattactaatttcctttgagctttggcttgctcatccatgaagtagtacctacctcacagggttgttgtcaggaatcaatgagagaacacacgcaaagcactttgcaattagcccagcacattaggtaagcactcaataaacgttagctactaccatttttatgtactcatgcaattcacttcttgacccaaatgcaacaacatacatttatcacttttcagttttattgggatatgatgtattagctgtgcttcccagctctgagtcatcctcagttctgagaaccatgccttctgcctttatccaaatcattgctgtaattgttgaggaggaaatgacctaaagtaaataccactaaatgtctctgtataggttggcaatgttccattaatcatcacccttgagttacattttatcctgctcacatttctccaccttatccaaaaaacggagacgcactgtcaaatggtttcccaaaattaagatattacattacctatagcatttccccaattgactggtccagttttgtttctgtttttttaagaaagtaaggttggttttgcatcatttgttctcaatgagcacgtgctggcttcttaaacaattatctttttttctgttcacaaaatacctgcttcattataaacatgaaatgatttcactgaactcagtcaagcttactgaacttggatttccagaatcttcccctgcccccacaccctttttgaaaagtctagaaaacatttgcctattgcttagactttagcacacttcctaatatttttgaattctaagttccatttgcaaacttgtgacttttctcagtagcctgggataaaatctgtcacaaagtggaacctgaaactatttaaagcagatatgatattgtaactatgcctttggcctgtgtctcctcctaaccatatttattttccccccttttcagtttgaaaatctttctccttgctggatgagatggaaatctttggtatatagtcctctctctatttctctcttctgctcaagaattagaacattgaaagtattttgaaaagtctaaagggtttcacaagcactttcttttttaatgaaagtcataatgatcactcatcagcatttcagactgaaacacgtgcagactgcagacaggtggcaaagtccaggggtccagagccatactgagcctgcagagaaccgtcgggtcagccccgtcctccactcccattagaacactggattgcttcctctggtctccaaccttcctagctattcattttagaggcagcatcatcaggtcattttctgtcccctcagtttggtctagttgccctcacattttatgcagctgtttcaacagtgatgtgtccccatcctccagcctttggtgatagtttacaaaagtgcttactttttgtgcatttactaaaaattggggagttgacttgatgttgtaccttcctctcttctctttttctgggagggtgaatagatggacggacagagagagtgtattgaattgaaaatacctctttgagtgtgtttctagctagtttagggcatctcggtccctgccacctggtgctttccaaaaatatgccatgatttttacaaatattttaaaaaataatgcatgggttatgccctcttaactatggatcaaaataatatcagcttttgccttacttatacattgatactttctacagttaaaatgaagactgttgggccccagttatatagattcaagaaaagagcaacccacagacagaattagccagacagctcaagctgctttcccccagcccaaatactctgagggtttagggagaccccatcacctatctctcagcacctgcctccaagagacaccaaaccctggactgaaggaccatgggctgacccacgtgatatgtgtcaggacccagggagtgagaaacagtcatttatatgcaagggacaccatgtcattgggccactgtccaggaaactaggttgaatgtcagggcactgtgagagaacactcccaagacccaacatccacatgtggggctcttggagtcagagggagaagacccacgtgtgtggctccaatgggccgtacagaccataaagagaaaggaaggtggtggcctggcgccccagtcaggagggataagagcagctcaaaaagtaaaaaatgatgagttccttctatgtgctagttacctgactaggaatgttcattatctcacttttcctccttgtgatcttttgttttgttttatttttttaagaaacaggatcttgctgtctcacccaggctgaagttagtggcatgagcatagctcaccataaccccgaactcttgggctcaagtgatccttccacctcagcctcccaatagatgggactataggcacacgccaccagatttggctaatttttaaatttttttttatagagataggggtctcactacattgcccaggctggtctcaaactcctggcttcaagcaatcctcccaccttggcctccccaagtactgggattataggtatgagccaccttgcccagccctcatgattttggaaatgggcactattaccctttctttaggtgaagatgatgacttgaggtcacatacaggcagggtcagagcaggactgaacctagatctgcctggcgccaacaatggcatcatcatctccactgtcttctctcccccacagttttcaggaggcctccagaacttcctgctgccccagaaccagtttgccatgttcctgtactgcttcatcttcattcacatcatctatgtcaccaaggagatggtcttctttctcttcgccaagcactacctattctgcattgcagccattttgctctgtttgattaaaactttctggtcatacttccaagtgcctttgctctctccctcactgggaaccctcgcccctgccatgctagagtgttatccgtgcatgatcccagcctcccaggcacctccttttttcactttgtgcctctgtccaatcagaatccactcttaggaagggccctgctgtcagtcatttacacctgagagtgaagaaacacgttcatgccccttatacagaaactgagttctcactgtggacatgatgccttatcccaagaggacgatttcagatgttagcaggtcagggagatatctgcagggaaggtgggtttagaacacctttccagaaccatagaagtacatcatgaccaagctggcttgggtttcaccacatctactcatgttcatagacctctgaggggtgggaagcctgtgatttgcttgggagcagcccccgcccccatcttctgcaaagatgtccatgtcctaatccccaggatcatgaatactttatatggcaaaagaggctgagatgtgattgtgtttaaggaccttgcagtggggaaatgatcccagattatccaggtaggcccgcggtagtcacaagggcccttgtaaaagggaggcaggagggtgcgagtcagaaaggagatgtgaccatggaagcaggggccagaatgacgtgggactgcgggtcagggaacatgggaagcctctagaaaccagaaaaggcaacagaaggattctctgctagagcctccggagggagcccagccctgccaccccatgttaggctcctgaagccaagatgcccaagctccctccagcttgccaacatggcaggataccatcaccaggccactggccaggactcatttagcactgggcctgaggagacttgtacacagctggccttcagacagcatatggtcaaaaaggagaggcagtgaagctccagcgagcctggcacaggcctagctgaacctggtggacaaggggtacccctatcactaagctgtgtatcccctgggtgaggcatgtggcaaaataagggcatactcctaggggacataaggaaggaggaattaagtgcctgattagacccagaggacgtcattaattctactctattagaaagctggacatggaaaaaaaaaaagttgacacacacccccaccccgtacccacctactaacccaagcacacagactcacaaaaatgcagaaaagctaacccagaaacaaatacactgacacagagatacaaaacaagtatacagttgtccacagtagagaggtttacagcccctcaaataaacacacaacaacccaaaggaacagactttgaacaccagaaggctcacggtcaggcacaaagtgaagctgccctgcaagtatgcaacaaaggggttcaactcccccagtcaccagcccctcagcccttcaatacacacactccttgcagactgtcggctactctgagcccagcagcccagccacgatggctggctgtgccacaggacactttagtgataatgtggcaaactgaatgaggctggacacagctgtgcaattaatcaagtctttactgaccccttctctcctctggcatagggctctgccttaagagtgacaagagaataagtttctgtctcattgggctctcgagcgactctcagtaaaatcacgtgaaaaaaatgactgccttgggacttcaatgtcagtacacattatcatgccatgtaagtccatggtgacttctcatttcccacccaactccatatatccaaccccattgatagctgcatgtgacaggtacttaatttggaagtgataaaagtatcatttctcattaaactttcaaggaagggccgttgtggtatgggtcacttcttctgatcattttatttgatctgggtttctgccccatggggttgaggtgagagagatggagataaggatagcaaaaagtttaaggtccacctgtttaccttcttagagcagacagaactgggcatttataaaacacacacacacacacacaaaccaaaacacccaagtgcgtaaggtcatttaatccatccatctgttgccaggtaaaactagacttaaatacattcatttttcttaatcttcagagaaagtaaactcccctgaacggttaagtgagcatctcatcccacatgtttagccacaggcatgaaatctactcttccctattgtgtttgaatactgaagccactagcctcagatctgccctctaggaaaatgagaactactcatggtcactccctaaacttagaacagatcttctgattcaaatgcaaagcagaaaatcagaagagagagggaggcaaaggataggaaaaaggcccagctaagcagttaccagccaggtaacaagccaatgtacaagcgcctcttcagcaccaatgctaacataccatgcgccctaagtccctaaggaggctatcttcaccaaaaccctgcaggtagaaatgtatatcatctccacttcacagccagggataccgaggttcagagacgttagacttaactgagatcatcccagagcacatgttctttccatgttaccctgctcccaagatcctaccttgggaggatctcacaaccttgctggggagatgagtttaacacacatgaaaatgtaaagcagctatcagtacacagacctcagctataaacgagatcatagaagagctccctggagccctgggtgatagaggaagtcttcttaaaagacgagctcataaggctaggtaagcccgaacaggtggaaatcaggagggatacctcacacaaatgaagattagggtgggagtgtgtaacgtgtatccaggagggaagggtcactcttgctccagggaatggtgtacaaggtaacaggcctggaaaattggtttggggctaagtgttagggagccttgaatattggtctgaggaatataaacttaatcccttgggaaataggcaatacactaaagattatagagtggaatagtaattcaaaacagataaataaaagccttcctcctcctttaattcctgggggccgcttttttgcctggaccttcccgtttccagaccaaaaactttctgaggtcctgcgtttgaggattactttcagctgtaaaagaaatccagccacaatggcttcaccaaatagaggtttgtgttgctcacataccaagaagtcccaggtagtccatccacggctggtgaaactgctctcagaagtcatagaggactcaggtggtgccttcctccaccaccacagggctcttatcctcagcccatggcttcccgcctcagtgtcaagttggctgaagcagctccaagtaccaggtccgttactccaggtcagaaaaggagccgccttttaaaagcatcccaggaagccccacccagagacttctgcttacgtgccattggtcaaactaaggtcatgtggctgcacctatctgtagggtgtctgaggtggtaaggtttttgcgtggacactgttgcagcctcaaacagaattagaattctgatagtatgagtggaggggggagatactgaattaagcaaataactggtgtatcatccctaattccttaggcccagctcccactcccttcctgagctgctgagccagaaagccttgatggggttgaaaccatcagatggagcacagccgtagccaatctgggccgggccactgctgcactctgctttaaggaagagtactgcataccacagcagggaggtcatggttttccctggccacacgcctggagccactctgccttcatcctcctgacctctgcctgaagcccatgacctgacacaatcagggcagcagactgggaagggcactcctctctgtgctgggtgccctcagcagagctgcaaggggaggcaagttggactccagagccccttcccttcctgatcccagatcccacagagcagagcccagagacagtcaggggactgtgatcatcctatggacaccaagctgctaaagtctatgtataagagattgcactcattgcaaaggaccactaagcttcagcccaaataatgaagcactaatagtaaagtttcaggcaggcttagggagagaaagatgggaaaatctctcctgttccctaaatggaatattgtaggctgccctcctgagcccaaggacaggactacagttggagagactcgggggcaggagggttaagccttgattccaaaggccactttcctgccatgtctatttctagtcccaagttagcagatgacttgtaagtaagcaagtcagttaagttttctaggcttcatttgggcgacctctaaattatctagactctaactcagaaaaaagaaggaccaaagtctagagattgttcgagaaattctgatttaattgatctgagatgacatccagagatgatttgttagccttacaagtgccccagttgattctaataagcaatcagggttgaaagacctaaatccttgctcttcaatgtgtgatctgtggatcagcagcatcggcgtcttagaaatgcagcatcccagaccctgccccagacccactgaagcagatgtggtttgacagtacccaccagcccccagcaattcatatgcatcttaaagtctgggaagcctgttataggtgatgagactcaatgcaatctgtcctggtctgtcctgggctagcgcggtggctcacgtctgtaatctcggccatttgggaggccgaggcaggagcccaagagctcaagactaggcaaggcaacatagggagatcccatatctccaaaaaaaaaaaagccaggtacggtggcatgcacctgctgtcccagctactgggaaggctaacaagggaggatcacttgagcctgggaggttgaggctgcagtgagctgtgatcgtgccactgcactccagcctgggggacagagcaagaccctaccagaaaaaaaaaaaaaaacaaaatctgttctctttatgaagacaatgctcttggccaggagggtcttctagggggaatgagagggagaacaaccgagtgcacagcccttcagaagtgctatggggtttccattaacctctgccgcaggctaggggtggcaggagcttactgtgccacatcaggaagctgagcctgtggcagcatatctgcccctcctccctttcaccagttcatgctctgggcttctggggaaccaaatgatttcaccctgcaggccagggctgagcagaaagttccagaatgccctcaggcctgtgtctgcctctgtcccttttttgatctgactcccacgtgtagctttggggaaatcttgctaatatacgttcattcattatttaaaggttgctgctgttcttcaggaaggttaagcatgattaaaagatgggatttttccacagggcacagcagaaaagctagggctcccacatttttaagctgttttggccaagccttgttgcataattcaaagtctgtgatttacttagatttaattagccaaaggagcagcagctgcaggttcattagttagtatttattaagcgccctcagagggctttttaggctcttaagagtgaagtggaggatgggtttcggacttgcaaatttcttacacttaagtaggaggggattacagatagcttcaggaggtaggcatttttgttcctcaaagagagcaaaggggtggcatcaaaaggcctgagctcgtggggcaaatcctacaaagggccacgagtcagagagatgtcagtccctcacagggttatagtgacaattagtgagataacaaggtggaggctggtggtgaataagaagctacacagatgagaggtatcagccagagcagggaagggaagtgactgctaacctgaatttcaagaactgggagaggtggggaggtccggctcctgaatttgtgggcccagtgcaagaggacaatgcagtgtcccatcatgaattccacgacggtgacagcagagcattaagccatgtggagagcccccactgagagcagggccctgtgccactgccctggcggtggatgacggagaccccagggttaaggggcttttgtggtgcctctcaaatctcacccagagagtgactatccttggcctgtactccatcaacaggagggagggagggagcaggctctgtgcattttgcaggggcagggaccgttggagcaggccattggaggaaggagtctggtggccccagggcaagtggcccctgcatgccttccagctctgggcgcagagtctgcctgcagaggcgcctcttcacaagcaggtcacgctctaggcttccagctgctaatcacaggggctctccagcttgggtgcatttcctccctctgctcctggcttccgccccagtcccattcagctgatcattctccgctgggctagaaaatccaaaaatagaagaaagctacactttttacccccttgagcctcttgtatcaaatgacacagtcactttgcctcaaacttttcatcaaagcagcctttgtaaggtcctggggcagaaagcaggccttggaagacagccaccaggaagccatgcagaaagtgctgagcagggggacccttggtggaggaggtggggagggcagggtttcaggagcttccctctgccccagaaagagccagtgacagacacttgctaccatggggcagctcttctctgagcaccagctctagcttcaggtcttggaagtgcaagagcagcaaatagtgtggctgcacagaccacccattgccagggttcaacaaccagaccacagagctcaatcagtgattaaggagcaatgattgatcaatcaaataaacagaaggagtgtaagagacgatctgagaaaggctctgtgagctaaagcattctgtgacggcttcttgaaaaggaagctcacccttgccgaatacctaggatgtattgtaccctgtccaacactctcatgtcatctattttatcccatagccctccatgaaggagcactggtacgcactagattaatctgcccaggctgctctaacaaaataccacaaactgggtggcttcagcaacagatgctcatttgtccacagttctggaagttgaaagtccaagatcaaggtgttggcaggtttggtttcctctgaggcctctctcggcttgcagatggctgctgccttctcactgcatccccacgtggtcttcctctctgtgtgcatccctggtgtctctctgaatgtccaaatttcctcttccaaggacaccagtcagattggattaagccctcattttaacgccatgacttctttttttgatttcaatagtttttggggtacaggtggtttttgattacatggataagttctatagtggtgatctctgagattttggtgcacccatcacccgagcagtgtacactgtacccagtatgtagtctaaagcccctatctccagatgaggtcacattctgaggtttcgggggttaggacttcaacacttgaattttgaggggagataattcagcccatgacgcccactttgctgatgagaaatcagactccgagaggttcaggaattgcccaagcttgctcagccaggaggtaccagagaccaagtgtggcaaggagctgaaagatgattggaagaaaacaaagaaccgtgctgcgtctcattcatttaggtttgtgaacaaaggttccgagctggtttgataacatgggaagagaactgctactccatttcagatggcattgtgtggccccctgtatatctctctagatatgtgtagctggggtagtggctccagagtttttctgcttatgaatctacccttttattctaactgttcccgtgtttcttttttgtttgttttgttctgtttttttgagacagggtctcgctctgtcaccggtgctggagtgcagtggcgcaatctcggctcactgcagccttgccctcctgtgttcccacacttccctcaccaagcgctaaggaggaaaatgtctttgagaggggacagatgtaaggcctcactcactggcccacctgacccacacacctgccatttcatgagtggcagcagatctatactcaaaggcctcggtaactccctctggatcccaccccatgtcctctcctaggtcccctaagacgggagagtcagtctgtaactggcagcctggggtcttccctcttcaatctgctatgcctggctctttttctgaagaccaggttggtatgtccactctgagacaggagtaggtataagaaagaagagggaggtggttgggtaagagagaaaccctatacagttcactcaggctgactttcacttctgagcaatctccatagcctcacatacataaagcccataatatttgagctagcctgagtgggttccaagaaaacaatgattggaagactctggaagcacagtagttggtagaaagctcacctgctctcaggtatcaggccaacttcaaaagaactccagatgactgcccttaagcaaactctatgcactgtgggagaatccttgttctcaaaacagatcagttaggaaactgagcatggtggctcatgcctgtaatcccagtactttgggaggccaaggcgggcagatcacctgagatcaggagttcaagaccagcctgaccaacatggcaaaacctcatctctactaaaagtacaaaaattggcctggcatggtggcatgcgcctgtaatcccagctactcgggaggctgaggcaggagaattgtttgaacccagtaggtggaggttgcagtgagccgagatcgtgccactgcactccagcctgggtgacagagcaagactccatctcaaaaacaaaaacaaacaaacaaaaacagatcaattagggccagggtcagaagctcagatgccaggagggcccaggtgggccagataaaagtgggaagctggccaggcatagctgactggaaaggaagaacccgtaaagcaggaagcctctactcctttttccctccttcccatcttcaccatgtggagatacatgccccatgtccaactcaagggcagccagaaatccagacttttatgtgatacctgctgatttttaaatgttggttcaattttctttagccactatacagacctaacaaaagtccacggggccaacagctcacaatctctgaactcgaagtgttatttcctttatgataaagtctctgtttcactcagagacacgctgggggatttcgttaaacagaagacactcctagtacaaaaatagaatgtgattcactctctaacaatgtttaagcacagaagccgcagtaagggatgcttcttcccttcacaaattgcctcaccttgaggtgtttcaagagacagatctcttaatgcatttcaaatcaggttagagtggcaaaaatctaattttcatacaacttcttgaagaaagatggcaatttcactaaagcctggatcaagattaaggaaggcatgaaacagaagcctgggagcaggaaaatgaggcgggagagggtggcggggtggagggtgaaaagaaggtgaagctgcatgcccaggctcagtgtttgcaaagaggctggcaaccgcggtgtgaagccagtcagacaaagagcagtggggcctggggacccgagtgagcagagaggggaggagaaggagggagtatcattggtttccatggtgacaaaggaacagggatgggaagaaagagtgagggggatgtcagagaagagctatgttgtgctgctgcctataacaaagtcttctttacccggacacccttgtctatgatttcttggcccctctgatacttcccccatcctgattctctgctcattcctggcatgaataaattactatgaaattaaggacatttagatcctaaacatggatgtgatggatgaatgggtacctacttactgagcctctgtctccaaaaggcctcttggattcaaaatattttctccaacgtgcttccgtaaagcccatgat

SEQ ID NO: 249 - DNA, 680 bp, Homo sapiens
gcagcgttctggttttctggatggcagcagaggacagggagatgatggaagcccggggtgcgggagaaagttgcccgaccttccccaagatggtgcctggtgactccaagtctgaagggaagccaagggcttatctggaggcagagtcccagaagccagactcctcctatgactacttggaagagatggaagcttgtgaggacggaggctgccaagggccgcttaaatcgctgtcccccaagtcctgccgtgctaccaaaggccaggctggcgacggacccaaacccgcagagctgcccccgacccctgggactgagcgcaatcccgagatggagctggagaaggtgcgcatggagttcgagctcacgcggctcaagtacctgcatgagaagaaccagcggcagcggcagcacgaggtggtgatggagcagctgcagcgggagcggcagcacgaggtggtgatggagcagctgcagcaagaggcggcgccccgcctgttttcaggaggcctccagaacttcctgctgccccagaaccagtttgccatgttcctgtactgcttcatcttcattcacatcatctatgtcaccaaggagatggtcttctttctcttcgccaagcactacctattctgcattgcagccattttgctctgtttgattaaaactttctggtcatac

SEQ ID NO: 250 - protein, 218 aa, Homo sapiens
MAAEDREMMERAGESCPTFPKMVPGDSKSEGKPRAYLEAESQKPDSSYDYLEEMEACEDGGCQGPLKSLSPKSCRATKGQAGDGPKPAELPPTPGTERNPEMELEKVRMEFELTRLKYLHEKNQRQRQHEVVMEQLQRERQHEVVMEQLQQEAAPRLFSGGLQNFLLPQNQFAMFLYCFIFIHIIYVTKEMVFFLFAKHYLFCIAAILLCLIKTFWSY

SEQ ID NO: 251 - DNA, 45764 bp, Mus musculus
  misc_feature (1)...(45764): n = A,T,C or G
gtgcggacattacaagtgtatacaaccatggccagcagcctgtcaacagactatttgtaatgttgctacctttaaatatcgatgtcaaagaatctgtttggctactttcttttgattttctaagaagaagaggtagataggaagaagaaggaggaggggggaggaggaggaggaagaagaagaagaggaggaggagaaagagaagaaggagaggagaggagaggagaggagaggagaggaggaggaaggaggaggaggaggacaaaaacaagaagaagaagaagaagaagaagagaagaagaagaagaagaagaacaagaagaagaagaagaagaagaagaagannnnnnnnnnnnnnnnnnnnccttcaaattgagcctcccaagtgctgggactataggtgtgcaccatttatctcttaagtagcaataaagtgggggaaggggggagatggctcagcagttaagagcatggactgctcttccaaaggtcctgagttcaagtccatctgtaatgagatctgacctctcttctggggtgtctgaagacagctacaatgtgcttacatataataaataaataaatctttgaagaaggaggaggaggagaaaaaggagaagaagaagaagaagaagaagaagaagaagaagaagaagaagaagaagaagaagaagaagaagaagaagaagaagaagaagaagaagaaaagagaataggaggaggaggatagaaaaggaaaaagacatttctttcttttgatccacaaatggcttcactttcaataccatcttctagagtaccggggttacggtatgaaccaccatactcagctagatttctttcatttatttatttttacacttgcttatttgtttggttgtgtagggtagagggcctaaaaccatagcacacctgtgcaggtcacaggacatcctgggggagtcattctctccttccagggtgtgagtcctggggatcccctctactagctgagtcatctctactacccaagtagttttcttgtaagataagcatatttgagccacacatcctcgccaacatctgctgtcacctgagttttgatcttagccattctgactggagtgaagtggaatctcagtgttgttttgatttgcatttccctgatgattaaggatgttgaacacacacatttgtaaacccagcacacaggaggctcattgagacccttacttaagcaaacaaataaagacaccctccctaataacctggcgtagtggctcacacctttaatcccaggtcttgggtagctgagacaagtgtatctctgagagttcaaggccagtctggtctatttagtgagtctctggacagccaagattaaatagtgagatcatatctcaaaatactactgctactgctgctactactactactactactactactactactactactactactactaaaataataataaatatcccaaacaacaaaccccgcatttcagagtattagtatacagaagatgctaaggtaacttatttaggtcttgtcaaaacaacagtccaggcaggccaggtgatagttagaggaaagaaagatgaagctgtgggaaaatccaggaagggacaggccactacatagagtcaacagtcaaagagggctgctgagaaactttcaagaaggagcccagaagaatgggagaagtgtccgatctgccttccagctgagggaaagcatgggaaacattgcagaattgggaccacaggaggatccaggcaagctaagcactggaggctgcttgtcgaggggatagactcgtgaccttggaaataaaacctttaattattcgtaggtgtgtgtacatgtgggcatgcatgagaatgtgactgtaggtgactgcagaggtcaaaggcatttgatgctctggggctggagtttcaggagctgtgcgtgatctgacatcggtgctgggatccaacctcaagccctctgcaagagaagcaagtgcccctaaccactgaggcatctcttcggccccagcctcacttgttattcagcatcatcagggagcaagtgtgaggtgaggagcatagtgagggatgctgggctttaaatgtagattgctgctgtgtaggtacacacaatgcacactggtcaccaacacttgagaggtcgaagcaagaggatcaagtcccaggccagcctgggctgcacaggagactctagattccctaaccccaccatacagggaaggggttgggatctagtaattgttgtgttttgtaaaaaagagagaaaaggaagccagggatatgtttggtagaggcatggtatggtgaagtggagggaggggtgcctctacgaccccattctgtgacatcccttccctctgaggtaccagacacagactggtatagtataaaatagagtttattcagggcatggggaggggagctgagggagtagaggcagagagagagagagagagagagagagagagagagagagagagagagagggagagagagagagagagagagagagagagagagagagagagagagaatgagaatagaggagtagaggccagccatgaacatgtggagggagaatgaggaggggaatggagagagaagggacagagagagtaagagagtaatagaggaagaggcaagcagccccttttatagtgagtcaggcacacctggctattgccaggtaactgtggggcggagcctagaagaactgctatcagtaattacaccctgagagagagagacacatattaaatgacaggaaagcagtgcctaattctctcaggatgatgcttttagacttgtcaggcatcaaatcccaaagaggatcccctaactaccagaaagcattgcactaggtgtcaggtatgtcagggtacacctgtaatctggcacctggtaagctgaggcaggaggatggctgtgaattctagaccagactggcatagaacacagcctggccctgtcttttaaaacaaaaacagtcaaataacgaaactcacaagaaagtgacgatcctgggctcagctgcagaccctgtgctaggtatgttacatgcatggtccctgcccttggatatttgtacaaggccaagtctgagacctccgagtcagcacagaatgcactgtatgttgaattctcagcacaaaggagacttacataccctggaagatacaaacagaggcagtgggatgggggctgcctctagactgggcaaaaacaacagtaggtgtctctgcagaagcaatttttaaggaaaaaaagggggaagtctgtgttagctaagtcttggttggatatattagtctgtgtagtcaaataatgcactttgattgctggacttttgtggtcagcctcaggaatgagttaggcataaggaagtggccaaataagggaatggactttggtggctctctttaggagtgtattctaatggttcaataaggaagagggaattggggagggcaagacctatcagtgccatgttagccatgctcaggcttgttagagcctatgactggcatccttgggtctccaccacaagctcctgatttacatcaggcttgggactggaactttggaccctcttttgctaagctgcagccataggaccctcttctctatgctcagcatctggcttgggtttctttctaagaaaaacatgcttcacttttttccaagccactgatcaactgcctcaggaatgtttagacttgttgggctgcctggagctgggaaggggctcttgttatggaaaggtactgatgcctctgctccactggctgcacctcttcctcctgtcctagaccccagatgcctgtcgtgtaccagtgcccgtgaaggctgcatttgtcccatctgttgtggctcagtgggtgtttccattaagggttcagagcccaggtggaggaggcttagctattatagccacaatagcttttgtgggatcccatatgacttgcaggtcatattcagaatttttttttaattatcagaggtgagcactgatctggagatgtccatgttgaggctctctgggctcagagtgagttgctctggggagcagaggcagacctggatggagagagggctcagctgtgtgaagtcaccatgcagagcatagccaaaccccaaggagcctcattgctgactctcagcaatggctcacattaaagtgaggagacaagacctttgtgccctgtgtgggcctctgcttgggttggtcacccacggtgtcacagttgggtggagctaagttaacctttgaatgctgggaagatgaagattggaactggacacctgtcaggggccttcttggtgcatcttagcgtgacaaagagtgtcatgtggcaagatgaggtcagcatactgttcagggcagttcctcttctgaggaagctggcaacccagcttgaagatcccaccacagtacctcctctaaccttactttctccacctctgagtgccagcaagctaagatctggtgaccagcacaggaattccgaaagacatcatctggagacgtggtgtgacttcggttattccaagggagaactattgggaaccacaggctgctggttgacccatacgctgtcctattgggtagatctggatggtgctccagcatccacacaggctgactgcaccaagtcagagcacactgggctgtgcttgagctgttgtgtgaaatagttgttggtgtttgtgtgtttatttgctatctatctatctatctatctatctatctatctatctatctatctatcatctatctgtctgtctgtctgtccatccgtccaccatccatccatccatccatccatccgtccgtccgtccgtccgtccgtccgtctgtctgtctgtctgtctgtctatctatcctgtctctcctccctttttcttcttccctcttcctttttctttcttctttcctccctcccttcttttttcttgtttgcttttctttcttttcttttctaaacatgtgtgtttgtacgtgtggcagagatcattgagtgtcattcctcaggagttatctaccttcatttatgagatagtgtctcttgctggaatcttggtctcactgataaggctgggtagctagccagtgtgctccagggaccgtctatctctgtctcccctgggctgggacttaggttcttaacaccatgcccaggtttgttgttgttgttgttgatgatattctctctctctctctctctctctctctctctctctctctctctcctctctcatgtgtgtgtctgtgtgtcacatgtgcatgcagattcaagagtagcatctgtctatcttattattttagcaaggtctctcattgaacctggaggtcatgaattagctatactgaccgaccagtgagttctggagacctgcctgtacccctgcccaagtactgtgaataagacatataagaccttgctttttatgtgggtcctggggatccaaactcaggccttagctcttacagggcatgttactgaccgagccatctcactagccttggtcttctctattttgtttgcttgcttgtttgtttattttaaaaatatttgacagaagcggcagcgattttttctctcatttaatatgctcatgaatgtgtagtcttctcagctgctgcctttcagtctgcctcattatcatttgaaattcaaagtccagagtttgggctcagtcttgatagaactcatcccatgtttttggacaagttgtagagatgcgtgtgtataatggcagtgtcttccagagtggtttcactgctctgtaaattgcagctctacaccagttcattcctgtctctgccagcctctggcagccataagcccccttttgcttttcctcaatgacatgaagttggaactataagagtcgggttgttatctttcgtgcagaggagttgtggcgagtagttttgtttgcttttgtcttgcagttctagggacagaactcggggcttccctcaggttgaacaactgctctatataccctatccctgattgtaccttgtgttatacaatcccagactggccttgaacttcactcttcctgctgccactcaaagccaatattacaggattcttctaccaagcttgaatcttagttttgttgctattgctttgtgcattcgagacagagtctcactacaaagcctaggttgccctcaaattcatgatcctcctgccccaggttcttgaacagctgggatttcagacctgtatgaccacacccagcagtttagactgctgtgtgaagcccctcttagggaaaaagaggttctgagctcctccatgcccttttagccaacaacattttctcacttgttaaaggctctggaattcttgtaaaatgtcacttgaaagccactgtcctactacaactctcttatttaacagatgacagccctagaaagtggagacaggaaggggctttcccagaggcacacaccctggcagagtgactcgtattaatcctgtgacactggactcttgtgaacttagctgcccccatgtctggactaccccggcttcttctgtcctacctccaccatggaaaagccctgtggcttgctgccagggaccaaagccaaatctatttccactttttctaatgactgtgtcttcacatagactggctggctgctctgagctcgggagagctagggagctgggacagaaataccaaggtggtcgagggtactgtgacacagagaacaagcttggtaacccggctgaggacaaccataaggtgactgcatctcaaatcccttaagtaccttcctctagtgagttggggtgggagcccagcatcacacaggcaaagcagttctggtattccctgtgccaccctgtgtcctcagctagacccctcccagcttcaagcatctcactcctactgtcctgtcccagtgaccctatatcctgagccatctcctaaagcaggccaagtcataaggacctcagacagccttcaaggcaagaggtagaaaccaggagctgaagaaaccataactatgagaagtactggccaggaaaaacacacacacacacacacacacacacacacacacacacacacacacacacatacacacacacacgaatacactcattagcttgggagacaaaaccactaatatcatggatctgattcaagccccagttttgaagccacacttcagcctgccattcacagctgtaacctagggctaaacaaaagcagtatttccagacgttcctaatgagacgcttctcatactcaggtcttccaatcttcctgctttcaaaggaaatgcacagacctctcattgtcttcagcactgcttttcatggtggggtgtgtgtgtgtgtgtgtgtgtgtgtgtgtgtgtgtgtgtgtgtgtgtgtgtgtgcatgagcacacacagaggatggaaccaaagatctctcacatgctaggcaagatcactaccattgagctacatatgccccagcccagtctctcagtattggttacactccttagttccattctgtctcttgtgatcacctgaagcccctgaaggaagtgaaagtcttcactgagactagcagtttctgccggcctcctctgtgcatgagcctgagctgcctactctgggagacaaaaggcctgatagtcacttcttcctttgtctatggcacttgtctcctcctgcccaggcccaagtcttcatcaccttccatgagctgttggaccaggacctccctccccactgctgtattttataaaaagaaagccaaggatatgtttgatagaacatggtatggtaaggtgggaagggatgcctctgcggacccatgccgaggcagcccttccctctagtacagaatagagtttatttagggggagggagggagagagagagagagagggagagggagagannnnnnnnnnnnnnnnnnnngagagagagagagagagagagagagagagagagagaagagagggagtagaggctggctaaggaaacatggagggaggggtaatggggagaggggagaaagggagaaaggttcagggagagaaagggcagagagtaagagagtaagagagcaaggagggggtgaaatgtcccttttattgtaagccaggcatacctggctgttgccaggtaactgtggagtggagcctagaaggaatgctaacatccccggctttgacaacttacagggtggcaaaaacatcagattgttcatttaaaacaaactctactggggctggagagatgtcttgggtgttaattttgcttgttgctcctccagagggccagagtgcagttcctggcatacacattaaactgctcacaactgcctgaaactccagctatgggggttacctcaccctcttctgatatgtgtgggtacttcactcacacacgcatgcacgcacacacacacacacacacacacacacacacactaccatcctcatctgctgagacacagcagcgccagcaccttggagctacctgccaacactttgacttttatgctgtcattttgtggacgtcttggaacctttaaatcttgaattcattgagcacttccattcacagcatgatcattaactgaaacaaaagtaacctcgcaaaacctaaaccctctactgtagtgtgtagtggggacagaactgtccccaaaggactaatggtggaaagtgccagagatgtcttcccaaatgggtgtggaagcctcggggaaggtcagtttgcagagggttttctaaaaacactgcccattcacagtgtgaatgggctcacacacacacaacatgcacagactttttctcagaagaggaaactgccttgtcacctgtgtcttcatttcttaaatgtcagccgcagaggatgtggccctgccaccattaccccaatctggttcttcgtctgagagacaggaacataattcgctaagggaagctggagggtgccacatgagaaactggacatccaattccaggaacttgggctgtctgggagttctgactagacattgtccctgtgtgtagggagagcctggtacgtgccgcaggcttgggtggggacagcgtgttggttacttacctcattgctgtgaggaagtactcaacaaaagcagcttaaggaagcactgtttctggcacagagtctgaaagtccaggccattgtgtaaggaaggcctggtgacaggggtgtgaggcagatggtggcactgcatctgctctcagaacgcagagaaagatgaatgctggtgcttagctcatattcaggatgagtcttcccacctcaatcaaagtgatctagaaactccctcataggcatggctacagggtggggaagctcagtggtcagggtctttgctatccccatatggcttgagtaccatgggcagctaaagaggacatttcttcctatgagggtgagcaaggccatctttgcctcccatcccttttggaaccactggcagaggagaaggtctatttgagaggcttatgaatcaactccaaagcaagtggggatataggaagcatggccctggaggcactgggaaatcccaagccaagacctgaggagacctgggcatgagtggaagtgggtgcattctggtgagaatatcccatctgggagcgaagagacccttccctgaaatctcccccagaacgatgagctttctgtgactggaggcttgtatgtgactatcacatggcacagagccacccttgacctttcaaggttccacaggaacattccctctccatgctccagaaaacggatacttaaagaggataagtcactcgccttgggcctcacagatgggactccaactcctctctagtgtctggaaccctgttgttcatattcttaggctcctcccacccccagccctcagcagcagtgcaagttcactctctgcctttgcctaccataatccgatgacatatctgagtgtatctctcctcccagaccatagtctgtgtgccaccatggatctgggatctccagagggcagctacctggaactccttaacagtgatgccgaccccctacatctctaccacctctatgaccagatggacctggctggggaggaggagatcgaactcagctcaggtgggtctcattccccaggacctctcctggccttctcaggacttctgcaggcaggagacagttagcaagctggagaaaaagcactggctgcctgtcagaaccatggacagctccccgacttcgcttattgcgctgaccctcatttggagccggtctccctccttcctcactgcccctcctcccagacacccaggcttcatcctactggctttccccttgcagagccagacacagataccatcaactgcgaccagttcagcaagctgttgcaggacatggaactggatgaagagacccgggaggcctatgccaacattggtaaggaggtcgcagaggccagagaaaagaccaagaagagtctttttcactaatgtcactaggtccttcccaccaaaattacagctagggtcagcaactagggctagaagggagggtacttagnnnnnnnnnnnnnnnnnnnnaaaaaaggaggaagggggaggaggaggaggaggagcaggaggaggaggaggaagggaaagactaaagggatgcagaccctttccctgatggctaccaagccaatcgtgtccttttacagtacttcccttactttctttctgtttatgcgttttgcttgttgggttagttttattttgcttctgagacaaggtcttttgtagcccaggctgttctgggactcactatgtattccagtccagtctcaaactcatggcaatgctccagcctcggctgtggaaccacagcacgcaccacatccagctctacacttccatttccatttttttctgctcctcttttacacaaagcccacaccacacacccttccccagcacctaagccaatgagccgccatgcatcagtcgacactggcaacgtgttggtttttacacccgtaagaccacactgacgccttggagcagccgatgaagtctgtgacgtgagaatcttctattcacagaggaggaaattaaggtggagagagatgaagtggcctcaaggctgagtcagatggcagatctgaaatcccatgccaaggctccacacttccaagcactgacttaaatacaaaaaggaagtgtctgaaattgagcagtttgacaaggcatgtccatcaaagtagcttcatggggtaacagcgtttgccaccaagcctgatgagctgaatttaagccccaggagtcaggtagtgggaagataggacagactctgccagttgtcctacaacatacttctaacgttgctgcccacctctggctaacacccactatttgttctcttcactgagatgaggaaacaggaaccagaaacattaagcagccagcccaaggaggtccagcagagggagctagtggagaatagaggcagaatttgaactcagcccagtggcagacattttcatgggcacatgctttccttatctaataagacagaaaacacatgaaaagctatgtctgtttgctcattcattcaaaacatactcagtaacctttataaagaccctactgtgcaccagcccagaaggtccttagcctgcggctagacacacagcaagatttcaggagatcctttgtttggttggttttggtttttggttttaagacaggatctctctacatcaccctggctgtcctggaactttgtagaccaggctggcctcgaactaagatcttctctgaggcacgcaccaccgccgccttccgtgggaacctttttgactgaccgtgtgcttctttatctggcagcggaactggatcagtacgtgttccaggatacccagctcgagggcctgagcaaggacctcttcagtaagtcgggagaagttgatctaggctcagtctttagtccttcctgacctgaagaaatggctgacagccacacctcctcatggtggctttcccggggattctgtgattgtgatgtgagtctctggtgtttctccaaagtagagcacattggagcagaggaaggctttggtgagaacatagagatccctgtagaagcaggacagaagcctcagaagagacgtgagtgagcccctccctgacccatcctgtcctttctcagatccggtccttccttccgtctgcagcctgctgtgtcccacttgtctccatttagtcctatctgtctccccaccacatccccatgccacacagctctagagcccagggggtggggatctatgtgggatgctttgattcctgttcctcaatgactgagtcctgcttccctttgggtctctgaggaatatctctttaagcaatgggtaaggcctcaggcaggactgggatggaatcctgaatctgctgttcataggctgtgttactgtgactagggacctctacacccccctgccctgtctcctgcctccttagtctgtcctctctgggtggccattgatgctttcccatgcaggttagggcacccctgccttgctgatcctctagttgtcataagatacatctgagaggcctgtgtggcctgtccgacctcctcccctggctcatcacagagggacgatgctctggcagcctaccccactgttcctgagatgttttcctctcacccttcaaagccattagctcactttgaccaggaaaccctccctgaccacacatccacataaagtcactgtcttatttatgcttatttctctctttttttttaatgtatgtattttatatctgtggatgctttgcctgcatgtgtgtctgtgtactacatgagtggtgcctgcagaggccagaagagagcaacagatccccagagacaagaattacagattgttgtgagccatcatgtgggtcctgggaattgaactcaggtcttgtgggaaagcagatggtactcttaaccactgagccatctctcctgtcctttttatatgtttgtgtgtgtgtgtgtgtgtgtgtgtgtggtgtgtatgtgtgtgtgtctcccaggccttttgcatgccaggcaaacattttacattaaactgcatccccaagccctgtaatatttatttactggtggtcatgggattctggcatggcatgtgctataaacatctaaagccctaagaataaacaatggcagcatttgcatcttctccccttcctggccttagcatctctccctgaaggcagtttgtgtccaacactctctttcgagccttgttggaatgctccactcaattgttctacccctacccccccacacacacacatgcacactcacacacactcacacacacacacatacctatgcatacacataaggcatagacacgtgtgcatgtgcatatacacacacacacatatgcacatatatacaagtacacacacatgcacacactattaccctctgccatgtgtgggaggtatttctagattgctgatggaaaacacaaggctctgtctgcagatttccccgtcttctcctctctcccttcttctcttcctccctttttgcagatttctttcctttaattgttgtgtgtacggacacacacatactatggtgaatatgtcaatatcagacagctctgggattagttctcttccacctttacatggttctgggggttggctttcccccttctctccctcttcccttcttccctctcttctttccttccctgcacgcagcccctcccctcggttgatattgggatctatttgccttgagatgctccatccattggtagattccttggtccatctacccatctcctttgggtgccttgccagtaaattacagcctaggaatccctttgctgcctgcccctccccagcatgctggctctttcacatctgactcaagcagcatccttgggtggctgccccagttggctccatgagcctcttgctgagggacatggttttcaccactaacctgtggagataatctctgcttcccactgttgtctgcaagtggacatgtgcgtgcaaaggtataggatccacagaggaagtatcaaggctctctggcaggctgtgaggacaacctgagtagagcccagagcagttggctctaatagtttttcagttttagcctcacctgatctgtgactctgcctctcccttactctcacctacctgccaatatgctttatagctaagacatgggctccagccctggcactggccagcaccctgaggtataggggagaagtgggacacagtttctcaattcctcaggcaaggtcacagagcctgctgggacccaagaaatctctatggctgggtacatcccaacccagggccactgatcttagggttctctttgcaggcttcccggaagagcatgctatggactcaaagcacaggaagctaggtgagatgggcaggtggttcagaggggtcccatttaggggagcacagcccccctcaaatacagcacaagccagcactgaacaccagggatcagggttggagtagttcagaggtagagtgtgtgactactgtgaacgaggccctcgttgaattctagcatcataggagtaggaggaaaggagggaggaaggaaaggggaagagaaaagaatagaggataaaacatccccactgagggaatctactgctgtccctcccacttgtcgcccctccatgtctctgtcagtcacaccactaggtgctagggacaccactataggcaagacaggctcagctgctgctcctggagaaataagtgccccttgagagggaattggtctttcaccccacatcactaaacagaagatgggtgctgtgaacaatcccccctcactgcctctgtctcctgcagtgcccacctctaggacctcactgaactatttggatctccccactgggcacatccagatcttcaccactctgccccagggactctggcaaatctcaggggctggcacaggtctctccagtgtcctaatctaccacggtgagtgtgggagcccagcattaaagctgactgcctctccttcctccctaacccctgaccttgttctttcccactgccgacattggcaattgtgacatagcacctggtcataaatcctctctccccaaacctgtctctgtctttgtttctcccaaaaaacaaagtccgggagtgtctctaaggtggtctgcctatgtgagcagtgtttctagggtggtctgcctatgtgagcagtgtctctagggtgatctgcctatgtaatcagtgtctctaaggtggtctgcctatgtgagcagtgtctctaaggtggtctgcctatgtgagcagtgtttctagggtggtctgcctatgtgagcagtgtctcttaggtggtctgcctatgtgagcagtgtctctagggtgatctgcctatgtgatcagtcttgtagccttctctgtgtgattacttcctctcccctcagtttttcttcattaaaaatattttattttattagtatttgtgcacacacacatcagagtgcatggctgcaaggcttgaagaagccagaggcgacagatctctctggagtgggagatacaggctgttgtgagcagcctggtgtggatgccgggagcccgatcaggatcactgggaagtagtatcatgcatgctcctactcactgtgccacctctgcagccctcaaacacaaagcaaagcaaacaatcaaaacccctcattttatttttaaactctgacattgatcatactcactattcagccaaacaataagagactggagacttgagtgtcccccccccccttgccagcgtgctgggatgaggtttgctgtgcatctgtgcacagctctctctaatttgcctttttttttctgaccaattaaatgttgatccaccatagaaaggctgccaataagccccgggaaggcatggctgggctttaagggacgaggtggggatgctcaagccgatagcctccttagacaagggcttcccagaagcaagggggcaactgctaacatgtagggaaatgagtgctgaccatactgtgggagtgcgggggagcagatgctctgagcaccctgtgagcatactgcgtccacttcacgagggacaggatgcaactcagtcttctctccccaaactcagcaagtgctcacctcgagagcaataagagaccatttatcccaaagccagatatgagtgaccaccgctgggaacacagagtcggggtgcctcaaatgccacattccaacatggaaacagttaaatgaatgttttatagagacagaacaagagagttgtaagtcaaagtatcttgcaaatacattggtgcaaacctcagcattgcaacaacgagggatgcctctgctagcgtccacacctgctatctgatggcattcttagcctttgggttggtggaaatagcatctggtacattctaaaaaggatttgtacctaaagtcttaaggatgctagtttaaacacagaggtgggcaattaacgtttgtggggtgggtgctaaagactacccaagacaatttggctctgaacctgcaaacttccagctctccacaggcacagaagtcctaactagtcggtcagcatttaacacagatgtagtgctctccccactccaggagaaaggcatttcacactctaccatttgattggagcagagatggccccagcacacttctggatgtgttcctagtggatatatcctccttatctttggtgtaggtgagatgccccaggtcaaccaagtgctcccttcaagcagcctcagtatccccagtctccccgagtccccagaccggcctggctccaccagccccttcacaccatctgcagctgacctgcccagcatgcccgaacctgcgctgacctcccgtgtaaatgagacaggtgaggcctggggcactgaaagaggcgttggaaacaggccttggggaaggatatttatcagacagtcagagttgcctgaggagatgggcaagtcagcccatgggtgacggatcatgagggagggtgtgtgaggactggggcagagagtgtgactgagggtcggatgacagctgggacacatatgtccatccaagcagaaccacaagccacaagcctcctgttgatccttggggtgtgaaagcatactccactgaaactggaaacttatagaacatgtgtttgaatgttgcttttctttgtctggagacagggtcttgctatatagccctaactgacctgcaattcaatatatacctattagattgattgtaaacttgcagaaattctatctaatcccctgagagctaggattatacatactgcaatgtctggcttaccataatctttaaagcattgatttaaattttttcttaaactggagatatcagatacagtcttgggcagccttcttgtaccctgatcttggagctcagacatgtggtcctgccctcagcatgccctaccactgggaggagtacatgggcactccccagactctaacttgacactgacttctccatcctcagaggacacatctccctccccatgccaagagggtcccgagtcttccatcaagcttccaaaatggccaggtgagtgacagtaggccctctgtcctggagacctgacatgaaagttcaaagcacttcattcattcagttcctggtcagttccttgttgtgggctcacttgctcattcatccattctttaacccattcgtgtatcacccagttgatttccccattgcttaacatctgttctgccattggagcagtagtacacaggtgtaagtctctctccctgggaggcactgtggatgaaggaggttaagtatagagcccagaacaatggaggatggtcagctattaaagaatagctaacccccaggatgtcccttctggagtgcagccccaggctttgtactgtagactccccagtcccagggtcacctccatttcacagatgaactagcctgaggtatagcagggcaccacacagatgggttcccaggtctcaaccttttaggtttttggtttttggtgttgctgctgacaccgtttgtttgtttgtttgtttgtttgttttgagacagactctcattatttggctcacaccattgaactgactctgtaacttaggctggcctcaaactcacatccctattgtctcagcctcttgagtactaagataataggtatgcaacactgtatccactgccttcaccttccctccctcccttgtttctccctttacttatttctttcttctgttttctttctttctaacttactatgtagctgaggaaaacttctgatcttcctgcctctacctcccaaatcctgggattacaggcatgtaccaccacattcctggttatgaaacgcagggtgacatacatattaggcaagcactctgtcaggaggtacaacctcaccagccccactgtattttttttttaaggctttaaatcatgtttgtttgtttagtgtgtttagtgtgtgtgtgtgtgtgtgtgtgtatttcaggtttcatatatgaaaggaaacatatgatatatgtctttctaagcctggttcatctcacttaacatgttgaatccacaaataacaactcccctctcaaaacccatagggatgagtgagtaaccgaagggttaaggcaggtcccagggggctgggaagcagttccgtggcagatcatgggctctggttttatccactcctctgggagagcaggagggtatggctgaataagtgagctggcaatgggcagctgtgagctatggaaaaactcttgaggggggcagctctggccacctcaccttccccaacccctactccactaacactctgactcaccctggcttttgtagaggctgtggagcgattccagcactccctacaggacaaatacaaggcattgccccagagcccaaggggtcctctggtggccgtggagctggtacgggccaggctggaaagaggcagcaacaagagccaggaaagggagctggccactcccgactggacagagcgccagctagcccacggtggtctggcagaggtacttcaggttgtcagtgactgcaggcgaccaggagagacacaggtggtcgctgtgctgggcaaggctggccagggaaagagccactgggccaggacagtgagtcacacctgggcatgtggccagttgctacaatatgactttgtcttctatgtcccctgtcattgcttggatcgtcccggggacacctaccacctgcgggatctgctctgtcccccgagcctgcagccactggccatggatgacgaggtccttgattatatcgtgaggcagccagaccgtgttctgctcatcctagatgctttcgaggagctagaggcccaagatggcctcctgcacggaccctgtggatctctgtccccagagccctgctccctccgaggactgctggctgggatcttccagcggaagctactgcgaggctgcacactgctcctcacagcccggccccggggccgcctggctcagagcctgagcaaggcagatgccatctttgaggtgcccagcttctctaccaagcaggccaagacttacatgaggcactactttgagaactcagggacagcggggaaccaagacaaggccctgggcctcctggagggccagcctcttctctgcagctatagtcacagccctgttgtgtgcagggctgtgtgccagctctccaaggccctgctagaacagggcacagaggcccagctaccttgtacacttacaggactctatgtcagcctgctaggtcctgcagctcagaacagtcctcccggagccttagtcgagctggccaagctggcctgggagctgggacgaagacaccaaagcaccttgcaagaaacccggttttcatccgtggaggtgaaaacctgggcagtgacccaaggcttgatgcagcagaccctggagaccacggaggctcaactggccttctccagttttctgctacagtgtttcctgggtgctgtgtggctggcacagtgcaatgaaatcaaagacaaggagctgccacagtacctggccttgactccgaggaagaagagaccctatgacaactggctggagggtgtaccacgctttctggctggattagttttccagcctcgagcccactgcctgggagctctggtggagcctgcagtggctgcagtggcggataggaaacagaaggttcttaccaggtacctgaagcgcctgaagctggggacactccgggcagggaggctgctggagctgctccactgtgcccacgagacacagcaacctgggatatgggagcatgttgcacaccagctccctggccacctctccttcctgggcacccggctcacacccccagatgtgtatgtgctgggcagggccttggagacagccagccaggacttctccttggaccttcgtcagactggcgttgagccttctggactgggaaacctcgtgggactcagctgtgtcaccagtttcaggtgtgggcagggcacagggcaggcatagactgtaactctggggacccctattccatgggtacagcattagatggtacagaataccccccccccattataagatgacaatactgagggccagagaaaggtaaccattgccactagccatgcagcctgtgggggagagtgtcattcttctaaccaatatttgaatacctgtggtgtgccaggcactggaacacatctagaatcgcagcctagcctgaattcaggttggtttcatccttcgatcaccagcgtgtgccaccattttcccaggctcagagacacaaccccccttagcttctctgcctccagtcttttctgtttcactgctctttgaattcaggcagcagagccatcttcccagaatgtgaatctggtcagattccagtgctgcttgcagccctgcaaggactccctgtgcctctcgggatggggggtctaagttcttccgttcagctcagtcaagtccatgttgcagcatgctggagcacagggtcatctccagaacagttcctcccacatccctgacactcacgttagaaggcctgccacagttgtgcccagaatttagcactaagcttcctggcagccagagaaaaagtgaaccagtaagggctgatgtggtcgtggaaggaggaggtcaagctaagaaaaggatcttacgaggtgggaggtccctttgcagagccccacctgcccttgtaatctcgccttggtgctgtgcctgggtctgaggccttccctccacagggcctccttgagtgatacaatggcattatgggagtcccttcagcagcagggagaagcccagctactccaggcggcagaggagaagttcaccattgagccatttaaagccaaatccccaaaggatgtggaagacctggatcgtctcgtgcagacccagaggtgaggaggcaaggggtcagagttaggtccagactgtgcaggcaagctatatatgtcacatgcacatcctagctacagagctgcccaatagtcttacttggcatgcccacacaggccctccactgcagtcccacccagccagggactccggttttgccctttgcccattctaagcctgacaccttgtatcagtctcttcacggctgaagccatggagatataacctgctgggggctaacaaggagaccttctgcacctactaactggtgggaccctcctagccccccaggcagccacagacccagtgccagcaccatttcaaccgtaacagagccaaggtgcagaggacaggacacaaggacaaggagagcattgtctaagacctaagtgctgctgagcgctttctccaagtctctccatgagtcagacacagatagaaccctgagatattcatattctctctgtctccatctttctctgtctctctctctctctctctctctctcacacacacacacacacacacacacacacacacacacatatacacaccacatgctatgcaagtactctaacaccaagctacatcccaagctcttataatatttttatttagagacaaggtcttactaagttgttcaggctgaccttgaattggatatatagttgaagctgacctccaatttatcatcctcctgcctcatcctctcaaatagctggtaatgtaggcttatgccactctgcctggccctaaggatggtcttttttaaagtactttattttgaagtgtgtgtgtgtgtgtgtgtgtgtgtgtgtgtgtgtgtgtgtgtgtgtacctgtgtgcctgcatacgtgtggagtccagaagagggcatcagaccctgagaactggagttataggcagttatgagtcaaactctggttctttgcaaaagcaatatgacaatattaaccactgagctagctcttcagtccccagaaattggttttttttccagtttcaacaacaactcccaaggaaggcagtcctggggggcaggatgtgggcactggaacataccagtggggctacacctacttaccaaagccctttctgtataggctgagaaacccctcagaagatgcagccaaggatcttcctgccatccgggaccttaagaagctagagtttgcgtaagtgaagggagaaaccacctcattgccccaaggttgtttctgccatcttcactgatcttggggcagtgacaaggtgagcagaaggggagagattggatgactcctgcccactcacttaaccactgggaaagtagccttcctctgctgagtgcggcttgtttgggtaagtgcaggggtcactcagagcagcagagaattggccatttacagggcaatgcagacacatgtgcatgtacacacacactgtacacattcacactcatacatataacacacatgcatatgcatacacacgtgatttatacttatgcacaacatatagcacataatttcacatgtacacactcagacacatatgcacatgcatacttgcctctgttagaaggatccttcttgagaaagttgagtgggtggctcagcgaattgggtgccagcttgactaggaccggtctggttgggcactgagagtcttgcatgcttaggatccactccatctcagcaaactgggacaattggtcccccaccctgtgtagccagggtagcaggaatagagatgataggaagcagtaggttctagagagcagagggtgcctgggctatgacaggggagccctgtccagtacacgggccctgaagagccccaagagttatttaagtctggctgcctgaacaacttttcccccagtgctgagggttgagtccagggccttgtgcatacctgtcaggcactctaccactgaggtacatccctacccatttatttgcttgtttgtttatactccatgctggcttcaaacttgctatataaaccaagccaagctatataactttgaacttctcatcttcctgcctctacctcccaaatgctagggttataggcacactctgccacgccaaacttatgtggtgcaagggatagaacccagggctttgtgcatgttaagcagacactctgcaattcagctacattcccatcccattcgtgtgtgtgtgtgtgtgtgtgtgtgtgttattttgaatggggttttaatatttagtctagccttgaacttttgctctccttgcctcagccctgccaagtacctacccaggattgcgtgcctattccaccacccggctctaacacagcattccacctgtaaaacacttcacttcatatcctagacagttggggagaaggacattgatgtcaactctcacttacaaatgggcatagtgagaccagagatgaagtagtttcttcagcgttataaacaccaggttagcttgcctggctgactagcaaactcttgtcagtgtttggtcctcttagagatgagatcactccagccaggaagaccttgtctcaaaacaaagagagctacccacaagatcctcaggtcattttacataaagtccccttcatgagaagagtagccctggaagacagtcattggacagatttggaaactgaggcttggtgatgttagtgatttgcctgcggtcccagctggccacacactcgctgccagcttccctgcaccccccacagataaccaagtttctcttgttttcaacaggacataaggtgccaaatatgtacaaaggtaaaaatattgctaaaaagaggaaatgtctgaagacagccgcagggtgttttctggctttgaattattttcagcataaaaaagcccctccctggtgatcggaactgcactctgggtaccagaggctgcggggtggaacaggctagagccaggccaacagccacctacatgctgggagtcctgagacagttctgaggaagaaaggaaggaaacaaggggggctattttagggtgtctcttgcagccacccccatgttccccaccctgcaggcctctttgactgtctgatcagtccacttaaaaactctcacatgagcggaggcggaggcggatacatgtggctcagtcggcagagtccttcctagtaggcacaagccctggttcgatctccagcgctatctacacggcatggggacacacatctgtggtcccagcatctagggtagaggcaggagaatcacttcagtcatcttacacatcttaggttggaggcctaggctcgagagctggcttctctatgctccctcttcccgctttctcctgaaacaagacccagcccccggtctctgggccactgtggggcagtgcctctgccctgaatgctcttccctatgcagcaggtccacgctggccctcactttcctctgtttttttttttttttttttcttgtttatttggatatgtgtgtgcgcatgtgtgccctgttgtggaggttagagaacaatttggctctttctaccatgccggtctcagggacaaaattcaggtcccaggttgggtgcaggcactttgaccccactgaccttgtctctcggtgttctgagacccttcctgaactcccccacagtgaatctgtctgcagcatttcttatctctcataagcagtgactgaatgggaaagctcatgggtgatccagaatggggttgggtcccatcttgggcccccccaggctttccccacactgacaagatccttccagccttcttccctgcagcacctggagtaagcctcctggacatcacggtccagaccatgaaccaagttctttatctcaatactaactctatgcaagtagtatcctagcattgggggagaaatgaggttttcccagtgtactgaattagtgagttgcaggttcagtggcctctgtatctgtgcacataaacacacacacacacacacagaggagagggggagggaaagggagggagagggggaaggaggggagggagagaaaatatatttaaaaacagaagctcatgcaatctggtgtgaccctgggaacagaccttggctggtgtggggacttcttcaccaggcaagggtgagcatgtatagacatgagcagcagtgaggacaggcttgctgctgaaagcagaaagtgaagtgggagcgtcccagcaggcctctgggtggtcctgagcagagcagtggcagagcagcacagtgggccattgagagcccagcaggcagggataagacactagggagtcagggagggagcctcagactgttctgcatctttgcactccactggccgtttaggtgtctgacctgtctgacctctactgttgattgcttcctaggttgggccccatcttgggcccccaggctttccccacactggcaaagatccttccagccttctcttctctgcaacacctggagtaagttacagaccctgacaccctccaccctctgccccgactttgtccccagggcacatggggagtctttctcctttttcctcttccctaccatctggggaaactgtgtgggagtcaggtgaccccaccatggggacttatgacccctaatacagggaagggacagagaatgggacaccccagattttaaaaaaaagtttggagttttgcaagctttgaaattcttttccccacacagcccccttcacggctcttcgaaaccacaaagggcagacaggtgggagcagggagctctgttcaatagattaggttccaagagatgtgggggggggggctgaccagcaggctcctacaaagacaagcagacagtctagtccatggtgtgtggccagctgaatggcgcccccaggaggttaaggccagctcccataagcccagagaggagcttatggtcaagagaaccagggctggaggacgctggcctggggccacaaggtaaatggctgcatttgatcccacctgcagcctggactcacttagtgagaacaagatcggagacaagggtgtgtcgaagctctcagccaccttccctcagctgaaggccctggagacgctcaagtgagtccactggccctgcctccttcctgcttctggtacagaacctttctccagccgaccctccatcctgtcatctgcccatctctccgtcattcactctttctgttctagatcatgcactctcccattcagccactgaaaatccattctctggtcttccaaatggatgtccagtccagggaccacctcaggaacactggccacctctttaagacatgatctctctctggcttggaacttaccagttatgccaggctacccagccaatgagcccccagagctccacatctccacctcaccagtgctgggagcacaagcatgcccaacatgcctggctttctgtgtaggtcctggggatcgaactcgaggctgtgagacaagcattttatcgagttatctctccagacctcatttattggtttgatgaacaaagacttagggaagccttgctatcctgggcaacagtggagaccccaaagatcctgctccctgacctcaggcctcttcatatacaataaaccagaagcaaacaaataaataaacaataattataaaccagtgagctggggaggctgagacagtggaataaccacacgtttaaggccagcctatgaatcggtctcaaaaaaaacaaatggtgggggaggggctggcagggtggtttagtcggtgaaggtggctgctactaaccttgacaatttgagttctgtcctcgggacctacatggtagaaggagagaaccaaccaactccggaacattgtcctctgacctacacacacactaaaaaagagaaagagaaaaaagtatcaaaataaaatacactgtaataaaagtttaatgcatgaaaactgttctgggatgttggaagagacaggataggttggggcttagcagtggaaacactgagcggtggaagttgtctttagctgttttatgctttgggaagttaaggtagaatgggtgtgtgggagatggacatgatacacccgtgatcccagcgctggagagactggggctggaggatctttgagttcaaggctagcctgggctacatgacaccttgtttcagaacaaaagatgtaaaaggggccaataagatgccttagagggtaaaggctcttgctgcacatgccgggagataagagtttggtctccagaactcatgtaaaagcatgtcaatgcagaaacattgctctcctcctaaagcggttaagagtttatttgggagccatcttgagtgaccgtggctcagaaacacagatctaggtaatctcagactccatgttccaacatggaggcaattccatgaagttttatagttttaaagaacaaagatagccatataaaatacattggcatggccagacagttgtggtgcatgtctttaatgccagcacttgggagccagaggcaggcggatctctgtgagttcgagaacagcctggcctacagagtttcaggacagccagggctacacagagaaaccctgtctcgaaaaacaagaaacaaaacaaaacaaaaaatatattggtaggaacccgagagaagcaggtacaccaagtagggggagcttttctacaggcccaagatgtcatctgagggcagtcttagcttttggattggtggaagctagtggtcagctaagttaatagagcccaagaggttttatccaccagccacacttctgacacagaggtgggtaaggactggctgttcttgggcctctcccgacctctccacaatctttcaatcagtctctgcgacacagagtctttctaggaattctaattcacaatataataataataataataataataataataataataataataataatatagaagcactgagaacatagtgatgataaagcacttatctaggacacacaaggccctaggttcaattcccacaacaaaacaaataaaccattttttaaaaaatctgtcaacactccatcttataaacaaggttaagaagcctgaaaatacccaaggattcatgtgtacatttcctgatgtgtaatgtctctataatttacaatggtccaggtataccacaagatagatttccctcccttctccactctccttctgaccttttttaaaaaaatattaatttgtttatttactttacatcctgatcatggcgccccctcctctcagtcctccctcacacagctcctccctccctccctccctccctccctccctccctcccccttccttcctttctattcccggacacatgagcatttattaagtacctactgtatgtagagctggaagatagccctaggggaaaaggcactatcaaattagacagcaggtggaggagaggacctctctctctgctcccacctctcccctcccctgccagcccactctctctgtaacaaacccttcatattggtgagtggtttctgtaggttcatcctcattacccatgacccttcccagggctggctatcatggctgtgtggctacagtcccctgtgaagcagcgagtttccagccggtgaggaagggagagccttccacttaggtcctggaccttctcctccctgtgtctccttagcttgtcccaaaacaacatcactgatgtgggtgcctgcaagcttgcagaagctctgccagccctagccaagtccctcctaaggctgaggtgagtgaggtaccccccactgaatgggctggggagatgggggtggggtggggctggnnnnnnnnnnnnnnnnnnnngaggtaggggtgaggggggtataggacccccttttgctgctctttgtggcacatcaccacagccttggggcaagtcgcttactagttccaagtctctatttcttcatctgtaaaatatgaaccatgtcaatggatcatgtgtcatactccagcgctatccctagtgagcagtagtagatggttgccctttacccaaggaagagcccactggaaagccctgcagtgctggcttctgggctgtccaccactattccagctagttctcacactgccaccttctggaagaccttggtgtagcagctccaacttctaaattcctttcagcaagtctttggtactaaggggcctgagagggaactgaatttggcccagagccccagccattcagctcagcagtagcagctcttggctagccatataggaaaggatttccttccccaagtctaggagaggtgtctgctatgcacctctactgaggcagccactcctacagccttccaagcaggtcctctttgtgccctgcaaaattcataatgtgtgtactcgttacctaaactaggttgtgctaagtgtataggattccctaacatgggtgtcttgggggtcgggggttggaggtcaggaaagtctaggtcatacgggcaggtgcctgtgggccaggaaggcatactaactactattgttgctgagaccagataccaaacaaagacaacctaaggaagggaggaaggaaggaaggaaggaaggaaggaaggaaggaaggagggaaggaaggaaggagggnnnnnnnnnnnnnnnnnnnnnnnnnnnggagggagggagggaggggttctttgggttcacagtgtgaggtgcagcccatgatggtgggagggcatgtggcaggaatgtgaaggcgaccggtcccattgcatctgcagccgggaagcagagagtactgagtgctgtgctcagcctgcttttcccttttacattttaaaaaaatactgtgtgtgtatgtgtgtgtgtacatgtgtgtgtatgtatgtgtgtgtgtgttgtctgcatatacacctatatggcaaacacacacacggtacctgcagtgaccagacgatgatagtaggtcttactggacttaaatggcttactgctatttcataatattgaatacattcattccaactacaaagtccccagagtttccaggttttcttcttcctgtggccaacccaactcaccttctgtggtagctcatttggccctgagcagtttctgtgtcacactgtgagacctgaatgatgcatagcccacagcataaaccaagagcctacctgctctccctacagtgaccccctcctaccagttctacaaatgagcagccgtgtgggtaggaagtagactggataggaagaggcacgtctttgaacctgggaagctcctccccttataatttccatgctttgggctgagaaagacctctctccctctccctctccccctcccctccctctccccctcccctccctctccttttccttctctcccctcccccagtctttcccctctttcccccttctttctttcctctcttctctctttcctaccccctctctctttccctctccttttcccctctcccctcccttctttctcccttcctcgtgtgtgtgtgtgtgtgtgtgtgtgtgtgtgtgttactgagtatgaagcccagagctgtttcatatataccggacaagcattctactactgagctataaccccagccttcttaactttctgtttttgaggggctgtggagatggctccacagttaagaacactggttgctcttgcagagaacttgaattccatttctaacactcacttggtagctcacaaccatctgtgaactccagtcccaggggaatctgatgccctcttctggcttccttgggcactgcacctatgaagcacagccatccatgaaggcaaagcactccccccccacacacacacacacatataataaacaaacatccatgcacacatataataaacattttttaagttctaatttgagacagggtctcatgtattctaggctggcctaatttgtaatccctctgcctcagtttcctaagtagctggaattacaggcctgaaccaccaagcccagtgtacaacttactgcccatgctgttgtatcttgaactcactgtggaactacaaataagtagtggcctcaacattctgggcctcaattagtccatctgtaaaatgggacagtagggcctgcctggggatgtgactcagttgttagagtgcttgcctagcatgtatgaggccctggattcattccatccccagcactgcataaactggatgtggtgcattgtaatcctagtactcaagaggtagaggcaggagaatcagaagttaaaggtcatctttgactacataccaagttccaggccagtatggggatacatgggaccttgtctttagatagatagatagatagatagatagatagatagatagatagatagatagatagatagaagtagtaatctcagttgagtggctatcacctggcctgaactggcccagcaccccaaccctctttcttcctctgttgccggcagcttgtacaataactgcatctgtgacaaaggagccaagagcctggcacaagtacttccggacatggtgtccctgcgtgtgatggagtgagtgtaggggctgggtggtgtctgtggaggcagaggatctcccacccacatcgtgagaagggttgaggtgggagttgtcatgcctcaggatgggtctctctcttcagtgtccagttcaacaagttcacggctgccggtgcccagcaactggcctccagccttcagaagtgccctcaggtggaaacactggcgtaagtcacatcgcccccagggctggagtatgtgagtgtctttagaagtcaaatcctacccctgccaactagtacctgatcctgggatgtcaagtgatttgcctgctggcctcagagatgaggatggcaatacctgcagacaagacttgttatgttagtaaaacttttttttttggtgggggtgggggtctcatgaagatgactgtctcccaagtgctggaattataagcatgcactgccacatccaatttcatgtggcaacggagaccaaagtcaggacttagtgctaggcaagcaggccaccacctgagccatatccccaccctaaacttttaggacaacgttgccacacaaagcactcaatgaatatttcatcaggatgaatcatatgaaattgccaaatccagtcattcttagaatataaaacaatagcaaagtcatcttttgtttgtttttgaaacagaattgtacttgaactcatgatccccctgcctcagcctcccgagtgtgtgctgcgcccaactttaaacttattcttattaagctgcagcgatgtttgttgtccagcaccttctactgttcagatgactttcatctgcacagttgtgcctggccttctcagacagacggtggggtctctccattcttttctcatggtgaccataacagaggcaaaagaaagagggaaggcacagctgcactcatagtcacaggggtaccatttattgtacctgtttgcagttgctcacatgctggcggggagcagtttagctgctgagctggccaggctgttaccttcaaagatccacagtgacctatttctgccagccaggtcctgcctcctaaagatgccacagcctcaagctttgtcccatccagggagaaagcattcaaagcacaagcctatgggggacagaccgaactgaaaccacagcagggtccaccttacagtgaacgagaatagggcagaggagatgttttcaaggtcacacagcaaactgggactgaaggggggggttctaacattctgttctccccatgctggtctgtatcctgccagataggatgtggttaaggctctagacagagtggggggcagggcttgtgagcagcttgccctcggtgtcctgctatgtttcctctaacctggccctgtggtcccatctacagaatgtggacacccactatcccctttggggttcaggaacacctgcagcagctggatgccaggatcagtctgagatgaccctgctgtactctggacaaggtaaccatgttggactccaggagggtcatctaggtcattgtccttgtgaaggggtgactaagggcatcgagcaaggctggttgggtgtcctagatccatgtgtcatctggagctatcctgtctccaaattggcaggtgttcttcagactgtggggacttaggccaaggaacctccctgaggtcagacttaaagaccaggaaaaacaggctgagccagtctcctacaatccccatccttggcattaggaagtccttcctttgaagctttatgtcttccttgctgctgtttcatcttcataggaaattaatatatttcctgccagcaacatgaagacaattgtcccctcaccgtgtgtctgtccaccctctcccctggcctatgttgtagttgtccttcagccccttcttcagtcccccacattgtgacagcccctactcttctgtcaaggctgcttctctggaagctcactgagtcacctgcctctcctgatctcccacagaatgtactctgggaacactgaccatgctggaccttgaactgggtactgtggactcagcttttctgtgggccatagcccataagagtcaacatcccatcaccctgcccctgcaggctcagagttgggccctgcctacacgaggaaaggacacaagtcttgctcttctgaaggccccaagaccagctccaggcccttacagcaccaggtacaaagacagccccactctgcggccgtgagcgctggtagacagaactggggctgccttccgtgggttcacccgggaggacaaaggccttctcttcgacactccaggacagaacgaggaacagaagcatccaagtgcctgcttgtccagaccagggccagcctggtgagaaagcatgtcttcctgctgctcccaacagggccacctagaggctctgaagacgctaagggcaacactggcctgcaaatctctagatgtgacagggagcctatggtagctctttctacttgtggcactgtttccataaactttaggtcaaagctgagtcgggcctggcccagaccctgggtgtgaaccaaaaggcagggagtggtctgcttcggggctgtggcggggagttcttctggcttcaccttcacggtcactacacttaaaatgcaccagctacgttcactgaagctctggggcttggtttatcccacaagtcccatctggggacatcttctgccccatctaatgcaaaacaaaacaaaacgaaacaaaacaaaacaaaacaaaacaaaacaaaacaaaacaaaaccaaaccaaaccagccgaactataataacttgaaacaatccacactccgctggccaggcaggctcagcagtgcccaccaacccagaagtcaggctggaatcatcttgagtgtgggtctagcatgtgacacaagttgctgtctgggagccctgagtccttaatgggacagctggctggggcttgccctccccgtagcattatagttatgttataggggggacacccagagaggagaaagtgaggagcccggccagcagagacagtctgtagactgctcagagcagggctcaaagccacacagtattgtttctacaacactctgcatgcgcccgtgtgcccaccatacagcccaccactgcctagatcctgtcttcactgcaaagatctttgtagcttccaaagatgcagtgaaaagttcttactcctgcacccgaggactgaagcagtgaccactgtacagagtggagtgctctctcctactgccctgctgcatcctgggagcagttctgtatagccacattggtcagccttggctacagctagcccaaaagggcttggcagcaccagtgccgctgctcctgtttcctctgggacaccccctttgagctcaggcaccacccatccctccatcgagacagtgacagcttgctttcttgtcttggcagagggagctgtgtggctccaccatgccagccctgatgccagcaggactggcacatcctaggaagtgggagctgggctagagggcctggggccggggtggtctgcatggctgctgggggcgattcttaaagagacaggtccagctgcagctcaggcttacattatgaactgttaggaccttgggctcagggtggcacatggaagtcccatttctgtggccaccagggacagcactgaggcactctccaaggcaggcatctgctgtacctgtcaggagaaaggcagatctgtatcgctcgctgcctttggtctgtctggaaatgccaaaaaatgtctctcattactctgtgttgatgatggctgccatcttttaatgagctgattaggtaaggcactcactatagtgctggggacatcactgattcttgatcctgtgtgctgggaagcgtcttaggccctttggcctgcatcttaggcccttggaagcatcaagggcctaagatgcttccaaaactgcaaaacaccaactcctggctgagctgcctggtttcatgctccattttgacatatacacaaggcaagtttcttctgtgccttagcttccttatctgtaaaatgggcagagtcacagtatcttctctcctgggttatgtaaaggctcaatgtggaaacaatattaataaaatgggtcagcaaaatggctgagggaataaagcaagcctggtgacccgagcttggttcccaggaccacactacggaagggagaactaacaagttcccctctggaagtttctgtgcactgcgtatgtactggagctacggtggttgtgagcctctgtgttggtgctgggaagagaactcaggtcccctgagaaggcagcaagtgctctcaatcactgagccatttctctagcccatttaaaaaacaaaaaacaaaaaacaaaaacaaaaaaaaaacgagttgaagccaatgcctggcacaggggttctgacagcctcttgtggactccacgggcactgtgtgggctcagtgcacaggcatacaaataaatcttgaatacataaaggtcatgtgtggtggcatacacctttaaccccagcacttagaaagcagaggtaggcagatctctgtgaattcaaggccagcctggtctatgttacacagggaggccctgtcttaacaaataaaactccaacacacagctcaatgcaggagttctcagcctttctttcaccctgtggtttattcctgcctctccctggaatgtcccttcccagactctatgcggctgacttcctgcaggactctgtgggacggaccctcctgcagctctgtctcttgtccctctgtgcctcactctccaaccccacctcaatattttctttttcaaacttttgtctgtgtaggatgtgagctctagggaagcaagggatctgtctgctttgatcatccctggtcgctctacacccagtcaggagccttgtccatagtaggtgcacagtaaatgtgagaaggatggttaatcctttgcacagcctcatgttaggtattcctacacacctgttgtaggcaatgctgccctaattgcacacagctttggggcggggctacaactgtattctaaactaggttagactagggaagaggactccattttttgtggtttttagagacaggatccacacacgtgaacaagatgttctaggttcctgtgctggaaatcttgcatcttagcaaacttaagtgagctgctgggtgtgactggccaggctgtgcactgcacaaaggctcctgggcagtggacacactagggttgcaccagagtggggcctggagtagaacagcagcaatttagagaaccttttggtaattagcatggtgccatctcgggggtaggttaagttgtgggttccaagttagaaagttggcattcatggggaatgccaatgtattagctttgctgtgacccctgtgaaggatctctgtgggtatgggcatgacatgctagaataggttaccaggccccacttgtgatgcgtaaaattctggggggatcggcagtctgcccatgtaatacactttcaatctaagtctctcctcaggccctgactttcttccaggcctttctccaaggatgactcttttcctgttatgtgtggctgtccttggagccaaaaaaccctgccatcttgggaaattcagctgcacaaaattcaaaattccctgttgcaaaaagctcatcccgtcatggaggcaaggagggccacaggctcctcccatgagtcctcaagcactcacacctgttgtaggcaatgctgccctaattgcacacggctttggggcggggctacaaccgtattctaaactaggttagactagggaagaggacttcattttttgtggtttttagagacaggatccaatgtagcccaggctggcacctaactggacacatagctgaggatgaccttgaacttctgattcttttgtctctgcctctggaatgctgggatattgacataaaccactgtgcctgttttatatgatgctggggcctagagctttgtgcaagcctggtaagcattctatcaaatgaattatattcccagcctcttccccattctttattttaaggtgtcattatatagcccttgctggcttggaactcacttttaagacctggttaggcgtgtggggcaggcaaggttagagatctgcccgcctctgcttcctgagcactgggattgaatgtgtgcgccactacgcccactccttccctcctccttaatggaggtgtatcctaggctctctgtgtgggacagcacgcagtcacttctatgagactcagacccaggggctttcagaaggcgagagaaggcagcctttctagagtgagttccctagtctctgactgcatctccagcaaactgtcaaccatgatgccccatctccaaaacacacacacacacaccagcaacagacaaggcaaaggaaattggagttgcttacatttttttaatgaaataagtcagcctctaagtattgcttttacaggtttatggaaatcaaggatctacaccattcacactatgcgcaccactcacacttccaaaaatagatttctagccagggaagcatggccttcccagtgcagtatctcagttctgtcaacctggagaggttaacccctgcctggccctggcatagccctcctcagagtgactccctgaaactacgatcaacagtcttgggtctgcagtcttcccagcttaaggtcaaccggcatcaagcaatgccgacagagtggcctgagaatgagcccatttgtcacttcagctctccatgtccttcccagaggttaagtgggggaggcaggtgcagctggggatgaagtgcagagaggtgacgtctggttgggtgcctgtaaacatccatcacaaaggtggcgagtcacaaccagacccaggacagtggagagccgggtggcaggcgagcggggccttcggagggcctggacactccctgtccctgcgccgagtcctcatttctcctggcagacacctgggttggggcaggaaccctgttgttggcatgagcaggcctaatcaagaagacaaaggacagtcatcaacagggccaaggcacctctggccagggctgtccccccccaacccccccggggcttgggtggggctcggaagccctgctctcacccttaggttctagactctccagagccccgcgctcaggctggggaagcttttcctctatcgtccttccttccttttaaaaataatttctcattgtttttaaatttatctatgttttaaaaaattatctattttttattttatgtgctttggtgttttgtctgcatgtttgtttgtgtgagggtgtcagatcttgtagttaccgatagacataagctgccgtgtgggggctgggaattagcccaggtgttctgggagagcagttagtgctcttaactgccaagccatctctccatccctaagagcaagttttaattctttgacaagttcatgtatgtatatagtgcagcaggacatttcttcctcatttctttcatactgtctttcctccaccctctcctcttgcttttcactttaacgtctcttttgatggtgactgactgagtggaactggggatgcctgcatgaacacagttgaggagtcattggcaggaacacaggaaactgaggaaaaggactcccactccaccagcagccatgaactcactaaccaccaagggcaccttagctagcgcaaggtctgctcgagcctcctctcccaccctattgcctgtcatttcctgctggattttgtttttgaggcagggtctcatgtaggtagcccaggatagccttcaccttctgattccctgccacaagagccgggaccttctgcactgctggaaatggaactcggaactcggggtcgggtggaatacaagctgagcaagtgttctgccgactgagctgcatcctgatcccgagggtgcgtgtttccagttcttatgaaggaatctgcttcactctatgattctggagacccacggcagttttccatggtgaaggagggctggccaggtgcgcaaggcaaggcaaaagatgccaaggtcagagaaggatctcagccataagagggcagctgagtaagctccaaggagtgggcagtgcctcacatctcacaggaagagcatggtgcttacaggaaggtagccagtcagctttgtgtccccactcggctcttcctcccatgacgcagcatcacccgtaagtcctggcccgatgtcaggttgtctcctccagtcgcctctatcccatgtttagctgtcatcagcatctctgtagcactggggtacccaggtccccctccttttagcccacctcagactcttccctctccaaacaccactgagcaccctgagacgtgagatgtgcagtgtgtcctgctgcatgacatgcaggggtgtgtgtggggtgatcatcggcatcaaagatttagcagtagctctggcccccaaccagcaaaagctggcagcacctccaggcaaccgtggctgttaaaactgtccccacctatttccaagagtcactaagcaggcatgaccatttccaccaggaactgtgcctcttcacattttacaggttgcaaaacaaaggcttagaaaagcagggtgagttgcctgcagttgcacaagtactgcaggcagggctggcactgcactggcaacaaatggggacaatcacaatcagggttgccactgcacccggtgctcttgtcgtgcaacatgactcttccttctgcctgccttccccagccctgagtaccgtgatcctgagacctctgtccgttttccagagcatgactggcccccagctatgagaacaagagagttaaagagttccacagtaagctgcttcccaccagtgactgccgggaaggtagtgtaccaacgccccagccccctcactggtacctggggtgacatcaaagcaccccattccggctcctggggcttctgagcaggactgagccccagattatagtggtagtctgcttagtgcccacctggtctatcttgctggcctcacttcccactctccatccacatggagtttctgagatctcctcccaaagaaacccaaggggtcgtggatatcttcaccctccttaccagcccgtgagttgatgctgttatgtctgttggacagataaagacatcaaagctcagaaagcacaagttactcactgaaaggtgctcagctcacaagtactgaaagctgcctagccatggtgccctggccctgtgtttccagcactaggaagctagggtcagagaatagcaggttagaggccagcctgggctatagggtaagactgagtttgaggacaagctggaccatctagtatgaacctgtttccacaaacagaacaagtgctgtgtaccaccagttcctgtgcccattttgcacgtcaatgttttacatgctgggccccaagctagaagacaggggtcaggcactgtgccaagttgtgagcaactttagcttgaagcaaccctcccaaagatgggacgtggtgtgagcaccgctggagatccacacagggctgggctgcacaggaaaggcaccccacggggagaataggcatagccatctcctgtagttctgagcatggagtggttggagctatatgctgaaatttctcccatcgtctatcagacttatctgctgaaggccaactgggaatacactctaccatgtcaggaaccttctctggttcccactgacaattccccccaccccctaccaccagacagggtcctccatccacccttttgtcccctcctgcctgcccagagaacctgtgggaagtaggggctgtagctacattggggcttccagaaaggctttctgagactcttgtcccatcacaccagagcctacttgtggctgctcttccaacgaaccttgggggagacagggaagtcttgaaagccttcatgttcagaagcctgcagcagaataatttactgagattccccctccggggtgcctactgcagagatgccccagcccagggtagggatggggtaggaatcaccaaggaggcctcatttcctgccagtcctctgactacacaagtggcccagcagctgctggtctgactgagccttttgacctaggagccctgtccctgtgcccgcaccttgacctaggtttcagtaggtgctgctgatttccaactcatttgccaagtctgttagtgacagccaatgatgccaggtgcctgtttactcaagttcctctcctttaaagcttttttttccatcttaaaagccgatttaagaactgaagatatgttcagtggctaagagcatccactgctcttgcaggggacccaggttctgttcccagcacccacatggtggtttcgaattacctataactccagttctagggactccaacggcctcatctgacctccacggtcccctacatgcacatggactcacataggatgcataaaataaataatttttttaaaagttgatttaaaggaaattatgtaaaaaacaattcaggggccatcaatgcggcttagctgatataggtacttgctgccaagcctgacttccttagtttgatcccaggatccacacagtagaaggaaagaaaccaacttttacaagtttctctctgatatctacatgtgtaccatggcatacccatgcccacccttgcatacataaataaatgtaataaaagaaagaaggtgaaggtggtcggtggggagcagaaagcagccttctcggggcacggacttagtgcttctcttctagacagccttctagaaactcacggcacacccctcttcctccacatacccaaaatgcatggcttgcccagctctgcagacatctgagacctctgtgctagaggcagaccgtgtagcaggccccacctggctcggggccaagggagtgatgacaatctggccacctccctggcagcaagggaccggaggaaagaagcttccccacactggattagcgctggcatctcgggcctggagtccacacccaggctggctctcactaggggccatctagtgtgtctgcagctgtccacaattccctacatgccggcccaggagctcctgaagctgtcacatagcacctggacattactcatcaaacaggctgagtgcccctatctccaatacctggtccagagtgttttggcttctatgatattggagcacagtaatgaatgcctggaggaactgaagcaagtctaaagtagattccatctacccgccaggacatgaatatggaggtcggaggacagctttcatgagactggtctccccccgggtgtgtcctggggctctagctcaggtcattaagcttggcagcaagagctttttacctgctgagccatctcgcaagctccaacaatgtagttttctgcaactttttttttccctctctgagacagtttcactctgtagcctgggctggactacagctctgatgcttctgcctcagcctcccccgtgctgaaatcagaggtgctggccactttacctggcccaattcaaaagtatttttattactgttttgatgtacagtcttactacaactattagctggcctcaaattcataatcttcttgcctctgtctaactatgaaaaaataacccagcacttgtaattttaaaaaggtaatggggtaatgtcaaggagacagtgaagaggacacctatagccagagaaaggaaaaagcaggaaggtcaaggtgccgtgagcctgactcctccgctccctccccgggattcctgcagcctagcacctcacttcagaaactctgggtactgtggatggctcatagctgggcatctaacacgggtcactgaactgccccaagcctcagtttccctccaagtgaccatcccaaggtgatgcagggaagctctgtgccagaggcacccagttctagcctctcagccaagctcccttcccggcaggaagcctgaggaggaggccttcctttagggatgagggatgacagctgcaagcgcatctcagctgactctcagtgggtaccaagcatcaccaagcccagtctgcttcacaggcagtccacagtgatgctctcttctagttactggccccagaagagcaaggaaccccaataaaggggggtcctggggtaggggtcccttggtctaacacatccaaagtgttggtagaactggggtttaaaccccaaatgtgtgtgactataaaaactttaggaaaccattttaggggtcacgtgagctggctgaagcaatcatacatccataccaaacacagattgctctgttgctcttggtcaggccttactacttctcagagagagttctaggttggtgctgggaactttcatctagcagcactagctcaacacataaagcagttcccagccctcaccattagctggcttcttcttgtggtgacatagcattcacttaaaaatagatccatgcagtctaggcgtgcgcctcagtagtaggatatgtgtttaggatgtgtgaggtactgggctggatcctcagaaaaacctaaaaaacagtaaaatacagtcaagagggcctggggccagagtttagttggcagagtgctttcctagtgttcacgaagcgctggtttctatccacctacactggcactgtgggacacatctacacccataaagcaggcacagtgacccgagactacagccccagcatttgagaggtggaggcagcaggagaggaagcccaaagccacggcagctagacaggaagtacagggccaaacaaagtccacatgagaaaggacgctttttgttgctgctgttctttagtttgtttgtttggatttgttttgttgttggtggtgggttttttgtttgtttgtttgttttgttgttgctgttgttgttgtttttgagacagggtttctatgtgtaaccctggctgacctggaactcaatctgtacaccagcctggccttgaactcagagatcctgcctctgcctccagagtgctgaggttaaagatgtgccgacctttttttttttttttttttttaaaccaaggagcactaaaactctaaggaaaagcattatttaccttaaactctaaaaggaaaagcagtaactcgcagtagagagacctgacacatatcaccaaagctcacagggccagcatggtacagggggcgtgtggctttcagaattctgtactgaggacacacattttcctgccaagatcacatcacctgaatggaatcctgagctcagacggacacctgacaaccccaggcagagacagctggcaaacgccacaccagcctcttgcacattgccaatgtcacacccagacatagacagactgagcatttggtccagaataaagaaagcagtgacctcaaagcttacacacttatcattgaaggacatttctgggacatcaaaagctgtgaataaagccagagagcaaagtgctcctaaatcctatccctgtccagctgctgatttcagccaggtgtggtggcacccaactgtaatccagcacttgggagacagagcaggaggatccggagttctaggccagtcttgattatagaagactccatctctaaaaacaatgacatcttgctggctttgacaaggacactacagataccaagtagatccttcttttaggaaaatacagaccaaaatattcaggaccagaggaacatcatgtctgcaatgcactctcaaatggtttagaacatgaccatccacatgtgtatg

SEQ ID NO: 252 - DNA, 5008 bp, Mus musculus
agaccatagtctgtgtgccaccatggatctgggatctccagagggcagctacctggaactccttaacagtgatgccgaccccctacatctctaccacctctatgaccagatggacctggctggggaggaggagatcgaactcagctcagagccagacacagataccatcaactgcgaccagttcagcaagctgttgcaggacatggaactggatgaagagacccgggaggcctatgccaacattgcggaactggatcagtacgtgttccaggatacccagctcgagggcctgagcaaggacctcttcatagagcacattggagcagaggaaggctttggtgagaacatagagatccctgtagaagcaggacagaagcctcagaagagacgcttcccggaagagcatgctatggactcaaagcacaggaagctagtgcccacctctaggacctcactgaactatttggatctccccactgggcacatccagatcttcaccactctgccccagggactctggcaaatctcaggggctggcacaggtctctccagtgtcctaatctaccacggtgagatgccccaggtcaaccaagtgctcccttcaagcagcctcagtatccccagtctccccgagtccccagaccggcctggctccaccagccccttcacaccatctgcagctgacctgcccagcatgcccgaacctgcgctgacctcccgtgtaaatgagacagaggacacatctccctccccatgccaagagggtcccgagtcttccatcaagcttccaaaatggccagaggctgtggagcgattccagcactccctacaggacaaatacaaggcattgccccagagcccaaggggtcctctggtggccgtggagctggtacgggccaggctggaaagaggcagcaacaagagccaggaaagggagctggccactcccgactggacagagcgccagctagcccacggtggtctggcagaggtacttcaggttgtcagtgactgcaggcgaccaggagagacacaggtggtcgctgtgctgggcaaggctggccagggaaagagccactgggccaggacagtgagtcacacctgggcatgtggccagttgctacaatatgactttgtcttctatgtcccctgtcattgcttggatcgtcccggggacacctaccacctgcgggatctgctctgtcccccgagcctgcagccactggccatggatgacgaggtccttgattatatcgtgaggcagccagaccgtgttctgctcatcctagatgctttcgaggagctagaggcccaagatggcctcctgcacggaccctgtggatctctgtccccagagccctgctccctccgaggactgctggctgggatcttccagcggaagctactgcgaggctgcacactgctcctcacagcccggccccggggccgcctggctcagagcctgagcaaggcagatgccatctttgaggtgcccagcttctctaccaagcaggccaagacttacatgaggcactactttgagaactcagggacagcggggaaccaagacaaggccctgggcctcctggagggccagcctcttctctgcagctatagtcacagccctgttgtgtgcagggctgtgtgccagctctccaaggccctgctagaacagggcacagaggcccagctaccttgtacacttacaggactctatgtcagcctgctaggtcctgcagctcagaacagtcctcccggagccttagtcgagctggccaagctggcctgggagctgggacgaagacaccaaagcaccttgcaagaaacccggttttcatccgtggaggtgaaaacctgggcagtgacccaaggcttgatgcagcagaccctggagaccacggaggctcaactggccttctccagttttctgctacagtgtttcctgggtgctgtgtggctggcacagtgcaatgaaatcaaagacaaggagctgccacagtacctggccttgactccgaggaagaagagaccctatgacaactggctggagggtgtaccacgctttctggctggattagttttccagcctcgagcccactgcctgggagctctggtggagcctgcagtggctgcagtggcggataggaaacagaaggttcttaccaggtacctgaagcgcctgaagctggggacactccgggcagggaggctgctggagctgctccactgtgcccacgagacacagcaacctgggatatgggagcatgttgcacaccagctccctggccacctctccttcctgggcacccggctcacacccccagatgtgtatgtgctgggcagggccttggagacagccagccaggacttctccttggaccttcgtcagactggcgttgagccttctggactgggaaacctcgtgggactcagctgtgtcaccagtttcagggcctccttgagtgatacaatggcattatgggagtcccttcagcagcagggagaagcccagctactccaggcggcagaggagaagttcaccattgagccatttaaagccaaatccccaaaggatgtggaagacctggatcgtctcgtgcagacccagaggctgagaaacccctcagaagatgcagccaaggatcttcctgccatccgggaccttaagaagctagagtttgcgttgggccccatcttgggcccccaggctttccccacactggcaaagatccttccagccttctcttctctgcaacacctggacctggactcacttagtgagaacaagatcggagacaagggtgtgtcgaagctctcagccaccttccctcagctgaaggccctggagacgctcaacttgtcccaaaacaacatcactgatgtgggtgcctgcaagcttgcagaagctctgccagccctagccaagtccctcctaaggctgagcttgtacaataactgcatctgtgacaaaggagccaagagcctggcacaagtacttccggacatggtgtccctgcgtgtgatggatgtccagttcaacaagttcacggctgccggtgcccagcaactggcctccagccttcagaagtgccctcaggtggaaacactggcaatgtggacacccactatcccctttggggttcaggaacacctgcagcagctggatgccaggatcagtctgagatgaccctgctgtactctggacaagaatgtactctgggaacactgaccatgctggaccttgaactgggtactgtggactcagcttttctgtgggccatagcccataagagtcaacatcccatcaccctgcccctgcaggctcagagttgggccctgcctacacgaggaaaggacacaagtcttgctcttctgaaggccccaagaccagctccaggcccttacagcaccaggtacaaagacagccccactctgcggccgtgagcgctggtagacagaactggggctgccttccgtgggttcacccgggaggacaaaggccttctcttcgacactccaggacagaacgaggaacagaagcatccaagtgcctgcttgtccagaccagggccagcctggtgagaaagcatgtcttcctgctgctcccaacagggccacctagaggctctgaagacgctaagggcaacactggcctgcaaatctctagatgtgacagggagcctatggtagctctttctacttgtggcactgtttccataaactttaggtcaaagctgagtcgggcctggcccagaccctgggtgtgaaccaaaaggcagggagtggtctgcttcggggctgtggcggggagttcttctggcttcaccttcacggtcactacacttaaaatgcaccagctacgttcactgaagctctggggcttggtttatcccacaagtcccatctggggacatcttctgccccatctaatgcaaaacaaaacaaaacgaaacaaaacaaaacaaaacaaaacaaaacaaaacaaaacaaaaccaaaccaaaccagccgaactataataacttgaaacaatccacactccgctggccaggcaggctcagcagtgcccaccaacccagaagtcaggctggaatcatcttgagtgtgggtctagcatgtgacacaagttgctgtctgggagccctgagtccttaatgggacagctggctggggcttgccctccccgtagcattatagttatgttataggggggacacccagagaggagaaagtgaggagcccggccagcagagacagtctgtagactgctcagagcagggctcaaagccacacagtattgtttctacaacactctgcatgcgcccgtgtgcccaccatacagcccaccactgcctagatcctgtcttcactgcaaagatctttgtagcttccaaagatgcagtgaaaagttcttactcctgcacccgaggactgaagcagtgaccactgtacagagtggagtgctctctcctactgccctgctgcatcctgggagcagttctgtatagccacattggtcagccttggctacagctagcccaaaagggcttggcagcaccagtgccgctgctcctgtttcctctgggacaccccctttgagctcaggcaccacccatccctccatcgagacagtgacagcttgctttcttgtcttggcagagggagctgtgtggctccaccatgccagccctgatgccagcaggactggcacatcctaggaagtgggagctgggctagagggcctggggccggggtggtctgcatggctgctgggggcgattcttaaagagacaggtccagctgcagctcaggcttacattatgaactgttaggaccttgggctcagggtggcacatggaagtcccatttctgtggccaccagggacagcactgaggcactctccaaggcaggcatctgctgtacctgtcaggagaaaggcagatctgtatcgctcgctgcctttggtctgtctggaaatgccaaaaaatgtctctcattactctgtgttg

SEQ ID NO: 253 - protein, 1057 aa, Mus musculus
DHSLCATMDLGSPEGSYLELLNSDADPLHLYHLYDQMDLAGEEEIELSSEPDTDTINCDQFSKLLQDMELDEETREAYANIAELDQYVFQDTQLEGLSKDLFIEHIGAEEGFGENIEIPVEAGQKPQKRRFPEEHAMDSKHRKLVPTSRTSLNYLDLPTGHIQIFTTLPQGLWQISGAGTGLSSVLIYHGEMPQVNQVLPSSSLSIPSLPESPDRPGSTSPFTPSAADLPSMPEPALTSRVNETEDTSPSPCQEGPESSIKLPKWPEAVERFQHSLQDKYKALPQSPRGPLVAVELVRARLERGSNKSQERELATPDWTERQLAHGGLAEVLQVVSDCRRPGETQVVAVLGKAGQGKSHWARTVSHTWACGQLLQYDFVFYVPCHCLDRPGDTYHLRDLLCPPSLQPLAMDDEVLDYIVRQPDRVLLILDAFEELEAQDGLLHGPCGSLSPEPCSLRGLLAGIFQRKLLRGCTLLLTARPRGRLAQSLSKADAIFEVPSFSTKQAKTYMRHYFENSGTAGNQDKALGLLEGQPLLCSYSHSPVVCRAVCQLSKALLEQGTEAQLPCTLTGVSLLGPAAQNSPPGALVELAKLAWELGRRHQSTLQETRFSSVEVKTWAVTQGLMQQTLETTEAQLAFSSFLLQCFLGAVWLAQCNEIKDKELPQYLALTPRKKRPYDNWLEGVPRFLAGLVFQPRAHCLGALVEPAVAAVADRKQKVLTRYLKRLKLGTLRAGRLLELLHCAHETQQPGIWEHVAHQLPGHLSFLGTRLTPPDVYVLGRALETASQDFSLDLRQTGVEPSGLGNLVGLSCVTSFRASLSDTMALWESLQQQGEAQLLQAAEEKFTIEPFKAKSPKDVEDLDRLVQTQRLRNPSEDAAKDLPAIRDLKKLEFALGPILGPQAFPTLAKILPAFSSLQHLDLDSLSENKIGDKGVSKLSATFPQLKALETLNLSQNNITDVGACKLAEALPAKSLLRLSLYNNCICDKGAKSLAQVLPDMVSLRVMDVQFNKFTAAGAQQLASSLQKCPQVETLAMWTPTIPFGVQEHLQQLDARISLR

SEQ ID NO: 254 - DNA, 86149 bp, Homo sapiens
  misc_feature (1)...(86149): n = A,T,C or G
taaaaataaaacacattgctggtctggcacaaagataaggctccttagatcctacaaatggcatgaagttaagaatgctggtgagcactcagtaaaggtgtttttttttttcctgaaggttcctatcaaactctagagaacctgagcttcctcctttgaaagctgtagagcatactaggagaactcaggtgagaatttttgttttgcttctgcttttttgagacagggtctcactctatcacccaggctggagtgctgtggtgcattcacattcactgcagcctcaccctgctgggctcaagtgatcctccctcctcagcctcccaagtagctgggactacaggcaccaccaagcctcgctaacttttttgtattttttgtagagacagggtttcgccatgttacccaggctggtctccatctcctgagatcaagcgatctgcccgcctcggtgtcccaaagtgctgggattatagtcatgagccaccgcacccgtccacaggtagatttaatggtagatttctgcatacagcggaaccctaatggagtacactgtcactgtaagaatgagcaagagctaaaccctaccagagaaacagctttgaaacttgcctgtcccaatcttagggttgaatgtaggaaaagaaaaatatcttacctgagaacttgtcattacaaaggggtccttactcaggtttgtgacctgaattcatgctatctagtaataataataataataatataaagatgttataaactggaagtagggtgctttaagattagcagaggtggagtcaactcctctctaatggaatttaactttattccaggattcaaaggtcacctacaatgaagttctaaagaaatgaagagctcacattaaaaaaaaaaaattacacacacaggcaaagaagcatagcatcttgagtggaagtaaatagaaaccatagacagtaaacacagaggtcaggcccggtggctccctcccactttgggaggtcaaggtggaaggatcactttaggccagcagttcaagaccagcctgggcaaaatagtgaggccccatctttacaaaaaagtttaaaaattagccgagcatggtagcaggcgcctataatcctagctactttggaggctgaggcaggaggattacttgagctcaggaattcaaggattcgaactgaggaattcattgagcagtggtcacaccagcctgggcagcagagtctctaaaagacaaataaacaaacccagagacttcggatacccgaatagagatacaaatgtgtaaaatcaaagatgtgcttaagccagctggcggagctcgggagagctgattgtgggcatctcttcccaactccacgtgcagcaatatcacattggtagcctgacattgtccatggtgggaatatttacaccacggaggttggcaaactctaaattagggcttctattttttttttttaaagagacagtgatacagttgtttaacatttactagaagactgctgaatatatttattttatttatttatttattttcaaataccaactcaaatcagatgctgaatttatttgaagattaacagagaagctttaaaaaaaatcagggaacagggactataaagaacaactgggcaggacacattggttcatgcctgtaattccaacactttgggaggccgcccaagagtttgagaccagcctgggcaacatagggagaccccatgtttacagaaaaatttaaaaaattagccagacatggtggtgcatgcttgtagtccagctacttgggaggctgaggtgggagaattgctcgagcccaggaggttgaggctgcagtgagctatgattgcgccactgcactccagcctgggcaacagcgcaagactctgtcaaaaaataaaaattaaatgagtaaattttacaaagaacaaaataagacttctagaaatgaaaaatataactaaaaatgaaaacttagtacacaaattaaatggtaaattagtagattttctgattcactaattctgaagaagaaagatgtaagagatatgttaaaagacatagaagacaggtgtaacataaaacaaattggagtttcagaagtaaataacagagaaaatgggaaaggtaatacttaaggataggtgtatgtctttgtatatatgcatctctattcaagagaacatttatcttgaatgtgctcttgataagacttcaaaggaaagaaaaaatgcactctgacctggaaattttgatcttagtttactaaatgtaatttgtctgcattgactatttagtctacgtcttctaaaacttcagagcaggccaggcatggtggctcacacccataatcccaggactttggaaggctgaggaaggaggatcactgagatgttaggattacaggtgtgagtcaccacacctggcccagatttacctttaactaataagactgtaagctgcataagactggcaattttcttttttttttctttgattttttgttcatgattgttttccctgtttctgttagtgccccactggggttgactcatttattcaataaatgaatgagtttgttagatggctactacacgccaggccgagtctaacatatgatgaacatcatttcccagttgaggaaactaagacatagcgctataagggggcatgttcaagcttatatgtaataaagcagggattcaaatccacttatactaacaacatggccaggcgcggtggccgacacctgtaattgcagcactttgggaggtcaaggcgggtggattacatgaggccaggagtttgagaccagcctggccaacatggtgaaaccctgtctctactaaaaatacaaaaattagcagagtgtgatggcgcacgcctgtaatcacagctactcaggaggctaaggcaggagaatcgcttgaaccgggaggcggaggttgcagtgagctgagatcatgccactgcactccagcctgggtgacagaccaagactctgtctcagaaaaatagaagaatactgataaaggtggcaggaatggtggtggtgatgatggtggtgatgacagtggtggtgatgatgatggtggtgatgatggtggtggtggtggtnnnnnnnnnnnnnnnnnnnnnnnnnnnnnnnnnnnnnnnnnnnnnnnnnnnnnnnnnnnnnnnnnnnnnnnnnnnnnnnnnnnnnnnnnnnnnnnnnnnnnnnnnnnnnnnnnnnnnnnnnnnnnnnnnnnnnnnnnnnnnnnnnnnnnnnnnnnnnnnnnnnnnnnnnnnnnnnnnnnnnnnnnnnnnnnnnnnnnnnnnnnnnnnnnnnnnnnnnnnnnnnnnnnnnnnnnnnnnnnnnnnnnnnnnnnnnnnnnnnnnnnnnnnnnnnnnnnnnnnnnnnnnnnnnnnnnnnnnnnnnnnnnnnnnnnnnnnnnnnnnnnnnnnnnnnnnnnnnnnnnnnnnnnnnnnnnnnnnnnnnnnnnnnnnnnnnnnnnnnnnnnnnnnnnnnnnnnnnnnnnnnnnnnnnnnnnnnnnnnnnnnnnnnnnnnnnnnnnnnnnnnnnnnnnncagcagccacaggggccagcctgggacgtgcccatagtatccagggagctgatcctcttcctctcaaggggaagtagccactccagcagatgctgtgttcccagccctcttctccttttcaaaatctgcagcccagtgttcctcccaggaacgcagggtctggcccaggttctgtaacttacaccttagccgcatccatagagtaagatgattgatgctttccttgaattatttttggtgatgataagatcatatacagaaagcatctaactccccagtattctcactcaagaaatgatatctgaatttttaaaattatatcatcattgatttccagctggaggagcaggaactagagaagccagttgccccccacccaacaggtaggtgacgtcaaggaccacctaagctcctagccgtgaactggggaaatagagcctgggcattttacatgtaaccaacttcactgcccctctcaacagatccctcagcaccctctcttttccctgctttcagcctcaggctccaagcttctcatccccagggcccctagtgtcttcagagtcaagacccagatcttgattggtaacagaaccatgacaccaagcactaaactggtgtttcccaaagtgtggtttctgtgtcacccttctggcaggcagataactaagggaaaaggggttcacccataggtgttaaataacaaccaatcacttagtaagaaagccccctctcaatcatcatcatcttcatcattatattaggttacaccatatgaaacagcaatttttatgaatctaaaacaaacaaatatcagcagttttatatgactcaatctaataggatactttagacatataaaaacttataaagaataaaggccagatgcagtggctcacgcgtgtaattccagtactttgggagaccgaggcaggcggatcaggagtttgagatcagcctggctaaaatggtgaaaccctgtctctactaaaaatacaaaattagctaggcatggtggcacgtgcctgtaatcccagctactccagaggctgaggcaggataatcacttgaatccaggaggcggagtttgcagcgagccgagatcatgccattgcactccagcctgggcaaaaagagccaaactccgtctcaacaacaacaacaaaaaagttataaagaataatggctaggctgagtgcagtggctctcacctgtaatcccagtcctttgggaggctgaggcaggagaatcgctggaagccaggaattcgagaccaacctgggcaacgttgtgagaccctatttctacacaaaatttaaaaattacccaagcatggtggcacactcccagctacacgggaagaggctgaggtgggaggatcacttgagctcagaaggttgaggttacaatgaaccatgattgcaccactgcattccagcctggacaacggagtgagatcctgaatcagaaagaaagaaaaaaaaagatgaacagtattttctttaaaatgaccagttttttgtggaagagcagtcacagagagccctgatggcaaataacttatgacgattctggaaggaattacaggttggtaatcatagatgaccaatgctaccattggtgtggagattgtactagcagctgagctcatgaggagaagactctagaatacctatatctgaatgttgtacctttagcaacctgtgttaagggtctcttcttagaaatgtagcagtcccgggtcatagcttatggattcacttttacatgtaacactatactatgatgaaacagaaggagagaagatgataaaagattcaactattaaacctttaaaactcactcactgtcccaatgtgtaatttatttgaataactttattttaacaaacatcaacttcctacactttgattaagtctattaagtttaattggttaaaggcatacgaactccagaatgtttataagacatttctatctattcttacggtgatttttatttctttctctttttttttctagcacaaacaaacctgctttgtgtctcataatgcccatgtgtaagaatttttctggcatatatactgaagagtggaaatcctgagtattatttaatgattttgtaggcattaccaaattactaccctaagcaattacaccattctacatgctctccaacaaagtagaattcccatttttctatacccttaacatttttacttatctgctgatgcaagagagctttagcttggtgctactctatctttaatacctttctaacacttgctaactaccttttgtcacaaaaggagataggtccccaggatcagaaactcgaggaaactgaaatctaaactttcatattatcattttccattctgcatgggtttttttgttacagttgcctactattcttgcacaagggatactggctttccaattgtgataaagataggaaatttccttttaaaagaaattaaatcagtaagacagagtaaaacaaaatattaggtaaataatagtacagattgcatgtgatttggaggagaaaaaaaattatgcagggagctctgaataagtaaagatgggagaagtaatacactggtgattaattgcaggggaatattgctgagctcaagaccagtgggttctgcaactaggtaacacctccctggaaactgtagtatttcagaagtgaaaaatcctggggatcatgtaatccaacctatgtgtttcatgggtgacgacattgtggtccagagagaggaagtttcttgccaggcacagtgagtcagtggccaagtggaggctggcacccaggttttcttgactaagcacatggcaagtggccactggattgataggaacaatcaaagcagacttattaagtgattacgacagcagatccttgtccctggctctgtgcacccactgtttgttgtttcatcatcttgtaatgcagatctcctgcaacctatccttttagttttcttttatctgaaaatgtctatttctgtctgcgttcttgagggatatttgcactgaatgtagaactcaggatgaacatattttaaaatcttatctcttctaagatattcttccacagtcttccagccgccatggtttcaaacaagaagtcggtgatcattcaggtgttctatatgtactgtgttattttgaactggctgctttcacgagtatctttttagctttgattttcaacagtttggctattatgtgcctaggtgtggttttcttgtatttatcctacttagatttgctaagcttctcaaatctgtattccttggctatttttcttttttcttttctttcttttttttttttttttttttttgcttaaaacaacactaatttattttcttaccattactgtataagtcttacatgggtatcaacgggctaaaatcaaggtgaatttgattcccttccaaaggttgtaggagagaatctatttctgcggtttttcaagcttctagaagctactcacataccttggcttgtgacttccttccttcatctctgaagccagtaacattgtatctctttgactagtcttccacagtcacaccatatcttttgtccccattttctactttttaaaatttcaatagttttgggggaaacaggtggtttttagttacatgggtaagttctttagtggtgacttctgagattttggtgcacccaccacctgagcagtgtacactgtacccaatgtgtaatcttttatccctgccccaccccaacacttcccccagtccccaaagtccattatatcattcttatgcctttgcatcctcgtaatttagctcccacttacaagtgagaacatacggtatttggttttgatgaggatattttcctttacatcttagatgtctttttcctccatggttataatcacagctttaaaaatcattgtctgctaatttcaacatcagcgtcatcttgaggccagttttcactgattgtctttttctcttgaaaatgttacctttttcctgtttctttatatgtcaactaattttgtttttatttatttatttatttatttttgagatggagtcttgctctgtcacccaggctggagtgcagtggcgcaatctcggctcactgcaacttctgccccctgggttcaagcaattctctgcctcagcctcccgagtagctgggattacaggcacctgcaaccacgcctgtctaatttttgtatttttagtagagatggggtttcaccatgttgaccaggctgttcctgaactcctgacctcgtgatccacccgccttggcctcccaaagtgctgggattacaggcatgagccaccgcgcccggcctatgtcaagtaattttgtattgaacacaggacattagggatatgttgtaaacactctggattctgttataatctgaacagcattaatatttttgggttttatttcagtagggacataacttggctggaatcaaatgcaaaatctcctacccctacacccattgcagctcaaatcttcgttcagcttatttagccttagctgagctgcttggagtctgacctacgaatatatacatggtccagaagccagccagatatttagacaattatatacagaatttgggctactcctttctccttctctgtctgggatttctactttccagtaggtatttttgccccaaattctatcctctgattataaagggcagtaaaccgttctttttttttttttttttgagatagagtctgactctgttgcccaggctaaagtgcagtggcactatcatagcctactgcaacctcaacctctccaggctcaagtgctcctcccacctcagccttccaagtagctgggaccacaggcatgaagtcttaactgccctgcacagcactgattggaacttgccttcagactaaactcatgaactgggaaattcacctgtgaagttctcattttccatatattgactcccttccagtatctgcctggcctgtcactctccagtgccttcagatagttgttttttatattctccccagagtttatagttgttacctgtggtagcgttgatcatatgggagctggtcagccacactggaaatggaaatcctttgtctcatttaaatgaataatgcaaatggccccagctgagagatggtaatcctgagtctggaaggaaacaaagtcacggcatgttacagaatgggcaggagaacagtcgcctatggttctttaaaactgggttggggatttttagaatcataaaccagactggcttctatgcaaatcctctgttttgtgcattagtaagttggggatagtattaacaaatagtcagtgttcgttaagtgcttactaggtccagtgtagagacccttaaatgcatatgagcttcgattgcttttagtgggaaattttgcagaggaggagactgaggatttgtgaggttaaactcagggtgatagtaatttgcatgattaatcaataataatgatggttcatatttattgtattattatcatgttgtagataatgcactagggactctatttatgttatctcatttaatcctcccaacaaccctatcatgtaagtactgttaacagagactaaaaatgctaagtaaggcaggcgtggtggctcacacttgtaatcccagtactttgggagactgaggcaagaggatcacttgagcccaggaattcaagaccagcctgggaaacagagtgagaccctgtctctactaaaaataaaaaaataaaaaattagcggggcatgatggtgtgagtctgtagtcccagctactgggaaacagagatgggaggtttgtttgagcctgggaagttgaggctgcagtgagttatgatcacgccactgcacaccagcctgggcaacagagcaagaccctgtcaaaaaaaaaaaaaaaggctatgtaacatgcccaaagtcacataattggcaaggagcagcagatctgggacttgaacataggcagattagctcccaagcctatttgcttaacctctataccacaatgccttcttgctatggtaaaacatctgaaaagacctattaccctataggtcctctaaggaggcatgtcgccttcctcttagcaatactagattggctccaacagaaggctgtgggcttctctggcacatgcacctgggtaggacccagagaatatctgtggagtctgaatcaacccaaaagccaatatccatccgttcatcaggaaccccagcctacaacgcaaaagaggaaatcttcctaagtagaaataaactgtaataaattgcagaggttccctcgtcctggttttcacttcatgttttggatgctgcatgctgggtgagcggagattccaggcactggccagggcagctgccctgactccaagggctgccatgaacaacttccaggccatcctgactcaggtgagaatgctgctctccagccatcagcccagcctggtgcaggccctcttggacaacctgctgaaggaggacctcctctccagggaataccactgcactctgctccatgagcctgatagtgaggctctggccaggaagatctctttgaccctactagagaaaggagacctggatttggccctcctggggtgggcccggagtgggctgcagcccccagcagccgagaggggccccggccacagtgaccatggtggtaagttggcatcacttttaatcaaggagaaatgacagactgtagacagctcaaggattttccctcctctctgaaagggaagtcaatgggaaggcagactggtgagaaatccaagtgtctagtgagctggcaggagcagtgaaaacttggagcactgtctctgttgctgggtgtgctggagcgaacggcgtgcttcccactctgctggaaggaaccatcccaggggcacgcagccaaatgcctgcttgggttcactccctgagccctgacgatacaccaacattaacggggcatggatggacagatcagctcctgccttcaaaggggtctgctgtctagtggggaagatggatgcaggcacaatcagtgtgagtcaaaatgagagaaatggggccgggtgcactggctcacgcctgtaatcccagcattttgggaggccaaggcaggtggatcacctgagatcagttcgacaccagcctggccaacatggcaaaaccctgtctgtactaaaaaatacaaaaaacagccagacatcctggtgggtgcctgtagtcccagctactcaggaggctgaggcaggagaattgcttgaactgggaaggcagaggttgcaatgagccgagatcacgctactgcactccagtctgggcaacagagcaagactccatctcaaaaaaaaaaatagagaaatggggtgcagagaaaggaggagccagagaaaaagctgaaagcagagcccactgtgtgtgttgggggggggcatgtgtgcgtttgcatgcatttgcttgtgtgtgcatgtgtgtgtctgtgtgacacacagagacagaaaccgaaagacagagggagagcgagaaaggaagggagagaaagacagacacagaaagagacagagagacaggcagagacagggagaaaagggagggagaggaaggaaggtggaggctgatggaggaagagaaaaagggagaaggtgggggaaagaaagagagagaaagagagaataagaactcgcttacgggagagagaatgaaggccttatttttaagagcgttggtggcacacaatcatctcaaaccagaaagacaagcctgcactgtcctctttccactcacatccttggctcctccaactttttacgtctcctacccacttacaaagaagtcctcccttcattgtaatgtcacaactttctttctttttttgagacggggtctgttctcttgcccaggctggagtgtagtcgcatgatcacagctcactacagcctccatttgcggtgcttaagtgatcctcccacctcagcctcccaactagctgggactacaggcatgcaccactatgcctggctaatttttttttaattattttttgtagagatgaggtctcactatgttgaccaggctgcttgcgaacccctgagctcaagcgatcctcccaccttggcctcccaaattgctgggcttacaggcatgagccaccacacccaacctggtcataactttctaaagacggtgtttgttccatctccttctgaaatgcaagtcttgagagaataacagtgattgacattgattatttagtgtgccagaaacagcctaagcgcaatctagaaccctcttacttctcccttgaccttgagccctttgatccccatccttatttaacacttaaagaagaaaacagactctgcccaggggtgacgcaacttgcccaggtcccccaggtgggaagcggtgaagactggatttgaagacagacaagctttgatcttcaacttagccttcagggcatcaaatgcattttggcggccttatcttgggcaccagggcagtgttgtttaccagctttcctgccaagacaacatttctacagggctggttcttcttgtggtcaaattctcacccaagtggtttccatcgtctattggactcctctttaattctcttcctcctaacagtcacctaggcaaaggggcatctttaccacccaaacattctcccttggcttctcaacaggggcgcagacagccagtgtggtcttgatggtggcacagatgccacctgggggagaagccagaaccttcctctctccctggctgcagcccctcctgccccagccacatgtgccttcactgccggacacttcagcccctcccaccccctctttccgagagtgctggttcctgttatttaactctgtttcctccctcgggaggtaatatatttatttctgatcccacgtgactccagaaagtggaactgcactcggggcccagtgtggtcttcggggagctgggaggggtgcagggcaagttgctcttttcctgctttctctttctgccctccagccagcttccctccagggctgccaggcttgacctgcgacagtgggcaggtgtgctgctgctgggcagctctcagaggggaagaaagaggacagggcaagagaattgcatggtttgtaaacaaagggcactgactttcattttgatgggggttcggaaaaggaaatcatccatgtggggtttttgtgaccctccctctcaaccactctataatgaccttggccctctgctgtgctaaacgctgcactggctcccacgttactcagagaaaaagctaaatctggacaatggcccacaaggcctttcctacctcatcagctccctgctctcatcccctactcctgtctgccttgttcatctactccagccatgttggcaccctcgctgttccttagacacgctcagcacactgtctgcctcagaacctttgcacatgccgttccctctgcctggagcactgttctctaagcattttcttggtcaacctcctaaattccttctattctttgcaccttatcaatgaagcctgccctgaccaagccatttagaattgcaactcctccctccacactctgagccccctccccagattgattttttccccactttttttttttttgatacagagtcttgctctatcgcccagcctggagtgcagtggtgagatctcagctcactgcaacttccatctcccaggttcatgcagttctcatgcctcagcctcccaaatagctgggattacaggtttgtgccactatgcctggctaatttttgtatttttagagacagggtttctccaagttggccaggctggtcttgaactcctgacatcaagtgatccgcccaccccacaaagtactgggataacaggcatgagccactgcgcctggctccccaccttctgtatatcttacttttgtattacgtgtgtgttgtttattgtttgaccctcccactggaaaataaactccacatggacatggatctatgttttgatcacaatatgtcccaaatacctagcacagggcctgagcacagggtaggtatgcaatatatatttgttgaatgttcagtggatggatgcgttgatgagtgggtagatggatgaatggatagttcatgtaatgccattattcctactttaccaatgagtaaactgaggcacagagaagttaatgatttgcctctggtcatgacctgaggagggagactatggggtctcatgagtcctggccaattgcagtacttcctgcaaaaaaaaaaaaaaaaaaaaaaaaaaaagtactgctttagcttcctcttctaaacaacccaaggggctaccgtaaatctaccccaaatagggtggcagtcttcaaactgaaaccagcctgatgattcagaagtccccttcagatattgcagtgccttaggtgcaattgtgcagaaagcccagttctggagatgggagcttaggggtttcgctctgtgctacactgagcaacctgtgtgcatccagccccaggaaagttccagtgagtcccaagagtcaaagtccttgccctggaggaactcaggtgcctcagtgggaagttaaagcaaacatttaggcagtccctggtcaacagtgggtcacaacatctgaacaacatctatcagaggccaaagaagggggagctaggatgggtgatgatggaaaaagaaccaggctggaggctggacagctggacagctctggatctgaagccatgttctgctccttacgtaccatgtgaccttggccacatgactagaccactcggaatctcagtttcttcatctctgaaatgggagcaatgatacgaatctcccagggctctagtgagggttaaatgagatggtaggtagaaaccttccaaggcagtgcttggcattaggtcgcactgtataaatatcagaccactctgagtctaacagcaaggagaatggaacaggaagaagataaaccaggggtttgaggcaccaagaaaaataattactgcagtctgggggccccagacaatatctagacacctaccccatgcaaaatgcagtgctgagtgcttgggtactgtgcatatttgagaaacaaatcaatgtggcccctgccctcgagttgaactggcacatgggccatgtcctcagacagcctgagtgcctgtcctgccttcccaattccaagaggtatgactttgagcacttcccgggcgccccgcctcagtttccccatctataaagtggagatgataatagcattcagagtcactgatctaagggctcagggacaccattcagtgtaagccccatacactccctgcaagaggaagctggttctgactcagccctgaggctggcatctgaggcaaccacaagcccaacgtgcatggtggaaagatgactgtaagtgggggcaacctcagctggccttgggtttgaccatggaatgcgaggcacaaaggggcccattttgcatactttctcagaggctgtagggcacccctgccagggtcttacattttattgattcctctgactctactttgttggttgtttttgttgttctgatttcattgcgtgacatttttgcccatgaggtctcagttctaggaatgacagaacaaaggctccctctgggaagtcgcctgatttattggaaagggaggaacaccccacccttagggatcgctaagctcccttcctccagcttccttccccatctggcccttaggatgtgagaaaccagagctgtgacacaccagagaggagagaggctgtgccctctcaccttctgggcttcctttcctgagaaccagcccctgttctgatcttgtgagtctcctttgcctcagggagggggatgtgttggcgaggaagactcgtgcctttcatcttggactgcttctctggccctctaccccaggaaccacagaaggagacacacctgtacccggaagctggcatttccccatgggttttcccaggccagcctgttccaaacacagcttgcccccaagcctggcacttctccaaccagtcacggtttctgttctctgttgctatgaccttgagcagttcacctgcgttccttactgtctactttcccatccacctacctgcctgccctccaactttcctgatctgtgtacctaccttcctatatctacttctttttattattattatcattattctcaccctgtcttttttttaattttttttgggtgggggggacacagtcttgctttgtagcccaggctggaatgcagtggcgtgatctcagctcattataacctctgcctcccagattcaagcaattctcctgcctcagcctcccgagtagctaggattacaggcgcctgccaccatgccgagctaatttttatatttttagtagagacagggtttcatcatgttggccaggctggtctcaaactcctgacctcaagcaatccacccatctcagcttcccaaaatgctgggattataggcgtgagccactgtgcccagcctctcgccctgtcttatggtggtaatctacttctcaatttatctatttatatctactgtctacatacttatacacttatttactcatgtctacttatcagttaatccatttctctacctacctaatcacccatatatttcccatgtatttacatgtcaaagtatttccctgcattcctaccagctaagccccctttacaacaatccatcagcaggtccaggttctcatacaccctcccatgtccctccctaatttggatacatagcagttgtattctactcacctatctccctattcaccgatctctttctctccctttcttgcctcctttctttccttctcctgaatcatttatttagcacctgctagaaattatggtggactccccatccagtgctctttcaccaaaaagcatgagatgaagaaggacttttaacctagtaggggaggaatcttcatccatttggaactggaggctgccttgatcattcaaatctaaaactccattcattccttcaaatggtcttagaatagtgtatcttctattttattattttattttattttttgagacagggtcttgctctgtcgccaaggctggagcacagtggcgcaatcacagctcactacagcctcaatctcctgggctcaagacatcctcccatctcagcctcccaagtagctgggactacaggcatgcaccactatgcccggctaatttttttatttgtggtagagatgaggtctcgctatgtttcccacggctggtctcaaacttctgggctcaagcgacatacctgccttagcctcccaaagtgcagtgtgccactgcacctcgcctgataatgtgtctttcaaatgctcagtcttgtgtaggtattggggtaagtgcagaaaattaaagacctgatcctagacattaacagatgtatgatctaatcagaggtagcagagatgatgcttatgaacttgaaagttaaagttgtattgccaaataatgttgcagcaagttttgtaaaacacagcaaagcaagaaaattatagttagctggaagcgcgatgaaggtgggaactcgagctttgcaggatggctaaaatatagaccaaaagggagaaggcaggagagcagcaccgggagggagcaagctcccagcattcttccttggcttgcagggaaccaaggtgcaaaggtaggactgagcagaatctgttttgggagactgcagcaaggaccggcaatttttccagaacaactgttctttacttggaagacctagttactccccatctctccctgggacttgccaggggaccccagcatggcaaccttaatgatggttctgctgggtgctagtggttgctggcatgctagtttctgactcgagacaaataaattcagatccctagggtaagaccggcttcagcagcacctctcctgacaggggtcccgtctcaggagagaactgactttgtcccaagcagacctgggctcggggaatcctcatcacctctgcaagagttttttgttgttgctgttgttgtgttttgttgtgttttgtttttgtttttgattttttgaaatagagtctcgctctgaagcccaggctggagtgcagtggtgtgatctcggctcacttgcaacctccacctcccccaggttcaagcaattctcctgcctcagcctcccaagtaactgggattacaggcgtgcaccaccacacctggataatttttctatttttagtagagacagggtttcaccatgttggccaggctggtttcgaattcctgacctcaggtgatccgcccgcctcagtctcctaaagtgttgagattacaggcgtgagccaccacgcccggcctgcaggagtctttaagaggcaggaacaaggatgcaggtgtttcaacagagaggaagcctggggtgggcttcattcctcctcgtgctctttgcccccattcactcagtgctagaggttgtcattctgcctctgagacatccggccccctccctctccatccccacaccctcacctgccacagctgaaatccaggtgcgcctcagctcctggctgggtaccactgccactcatctgtagactctctaccctggtgccttcaggtgccaaagtgcatcctctgccatcagtcaaacacacaggttgacggatgtcacttgctctgctcagagacctgcaccgacacaggcatggtcaggttcaggtcttgtggacaagaactgggtctggaggagtcagggaagatgtagatgaggaaggtggtactgaaacgaacctctggtacagggaagatgtaccaggcagctgcagtcacccaggtgagagatggtagtcctggctggcccattctaagttccaaagctgccttggccatcggtctgagggtgggatggggggacatcagaaccagctgtctctgagaacataaagggacccccatatgggacctcaagacagctgagcagtcagaggcgcctctcccgtggcaccaggtcataggataatgagacttcttagaatttctttctttttttttcttttttttgagactgagtctcactctgtcacccacgcttgagtgcagtggcactatctaagctcactgcaacctccacctcccgggttcatgtgattctcatccctcagtctcccgagtagcacacgcaccatcacgcccaggctaatttttgtatttttagtagagaaaggattttgccacgttggccaggctggtcttcaactcctgacctcaaatgatctgcccacctcagcctcccaaaggactaggattacaggcatgagccactgtgcctggtcattcttagaatttctgacattcaccatatccgtttgttagccccactaagcaaggctgtttcaaattgactcagcatttcttatttgtcaatttctaccccactcctcacccggggacttctgaaaacagtgaaggcttcaaagtaatcaccttacaaagaagggcatcatcctcatttcacacatggggaaactgaggaccacagagaggaagtaaagaggccaaggtcacacacctgctactaagttccccgtccagtgctctttcagcaaaaatgcatgaggcacacaagtcatgtttccaaaccttcatttcagtaccaccttcatcatttttgtgttttccacataacactttactattatttatgacagggttttttttaaccactcaccttttttacttatctttcttttctttttctttaggagaggcaggatctcactctgttgcccaggctggagtgtatttcatgatcatagctcactgcagcctccaactcctgggcacactcgatcctcccacttcagcctccagagtagctgggactatagttgtgcaccatcatacatggctaatttttaaaaaatcatttgtagaaaaattagctggatgtaggagaatggcgtgaacccaggaggcggagcttgcagtgagccaagatagcgccactgcagtccagcctgggcgaaagagcgcgactccgtctcaaaaaaagaaaaaaagaaaagaaaagaaaaattagctggacatagtggcaggtgcctgtaatcccagctgctcgggaggctgaggcaggagaatcagttgaacccagaacccgggaggcggaggttgcagcgagccaagatcatgccattgcactctagcctggcaataagagtgaaactccgtctaaaaaaaaacaaaaacaaacaaaaaaaaccccaacaatttgtagacatagggtgtcactatgttgcccaggctagcctccaactcccggcttcaagcaatcctcctgcttcggcctcccaaaatgttggaattacaggcacaagccacctggcccagccatctactttatattcaaataaaactttacgtcccattataaagggaaaaaatggcaaaaacaggaggtaaccatttaacaagaaagcagagtgatgttagattatagcaagatactgttgactgtagaaggctctgaggctagagagctgctttctataaaacggagtgatcatatattagaagaggtgttaaagacatgttcacaccaagctgagacttcctccttgataccaccaggaggatgggcagagactggaaaagacactaactttctccctatgggagtcagtattatttagcatcgctttggcgggtcaccccaaaccatctgactacaagggtaccatatttgggttaacactcttttggtataatttatgttttagtccaatgtcttgggatgaaaatgacaggtgggccacttatgatctccagagaaattcagggcaatttggtgtgggagtaggcatggtagaggagagcagcatctaagaagtccccagcagaggctctcagcttgtcttgaggcatctgggcggagggctatgatactggccccatcctgcagaaggtggcagatattggcagctggcaccagtgcggttccattgtgatcatcatttctgaacgtcagactgttgaaggttcccccaacagactttctgtgcaactttctgtcttcaccaaattcagtccacagtaaggaagtgaaattaatttcagaggtgtggggagggcttaagggagtgtggtaaaattagagggtgttcagaaacagaaatctgaccgcttggggccaccttgcagggagagtttttttgatgatccctcacttgtttctttgcatgttggcttagcttggcgggctcccaactggtgactggttagtgatgaggctagtgatgaggctgtgtgcttctgagctgggcatccgaaggcatccttggggaagctgagggcacgaggaggggctgccagactccgggagctgctgcctggctgggattcctacacaatgcgttgcctggctccacgccctgctgggtcctacctgtcagagccccaaggtaaaaaggccgggaaagcatcttaatttagcgtgcagtctcagctggtcctgccattccagataaacagagaaaccattctgaattggggatgggggtgaggatgggaacaggagtctgtgtcctgctggggcaggccattggaagatgtgaaagagttgtctatttccttccaccggagggagacttcaggtcagccaggtgtctggagtatgaaccatgtatcagcaccgagaggttctagaagtcagactttcgggcagtgtgtcactaactctcagcatgctggcctggctcggcccacagcaaggtcttctcgcctccctttgggtaaatactgaggggtgcctctgcaggacgggacctctgccagactccactccatacccagagaagcagggaaaccaaaattggagtcagccttgaggtgtagctgttgagccctcagcagctggggagagctggcggatgctgccctccccccagtttcctaatggtgttgtttaaaaagggtcaggggacgggggaacagatggtgggaagagcacagtgcagacacctggcaccggctctgaaggcagcatggcagctacaccgttggctgggaagggtgtgcccctgaagaagtcgtttacattctggagtcaattttcctggagtgtacaatggacctgtgggaaagcctgtatgaaagggtaatgatgagggacctagcacagtgtccaatattttataggaactggaattgagctcataggagctcaattttattggcattgctgttgttggatggttaaaggggtggtatcccttttctcagactcccctgaaatgtatggtttgctttgaacccagagactgatgacaggtctgccggtgtggttgggtgcagccttaagttgctacgggaaagtgttggagggggagaagtcagaggtaaccttgccccctccctcaattccagatgaggaaattcaggcctgaaaagggaaagtgaccacctcaaagtctcatgccttggaggacccagcaggaatccaagacctctgaaaaggaccggcagggctcttgccacggctgggggtgtggtcatggtaacacaggttttccatccatggaaggtacctgagggattttctcttcctccctagggccagcatcagaggagtgaatagctcagttagctcatctcaggggccatgtgccctcggaggtggtttgccactttcacggttggactgagttggagagaaacagagacccacccaggggtggggacaagctccctgcaactcaggacttgcagatcacttgcccaagtggctccctagctcctggctcctggcccggggcctgggactctccccgaagtggggctggccactgtgaggaaccgactggaggcagggacctcttggatgccccaggcagttgggatgccacttctgataaagcacgtggtggccacagtaggtgcttggttgctccacagcctggcccgagctcagcgctgcagaaagaaagtgaaagggaaaaagaactgcggggaggcggggaggtaggatgaccagcggacgagctgccacagacttgccgcggccccagagctggcgggagggagaggccaccagcagcgcgcgcgggagcccggggaacagcggtaggtgaccaaagtctcctctgtaacccctaaggtcgggctgagaatcgaggctccgagactgtcagctacttgctcaaggtcacacagcaagtctgggaggatggggggatggaatatgcaaaatgtagggccgggaaacacctcgtttccagcatccccgcaacgactctgcgcgggaaccaggagccgggaacccggagcttggcttgctgtgcccagagctccggggccgtgggcgggtggcaggaaagcctggcggcagcttctgcagagaagccggagtgcagactgggagcgcggagcagacacactcccccggccacccttggccgactccgcgcgcccgggatcctgcagaggtgcgcgcccttcttgtacgccagactttggaccagggccgccgttccctgagcttcactttccctgttgggtcatattccatctctaactctggaatcttgggtattgggctctccaggcggggggccctgctcagggaggcagtagggagccaaacctttaaccagaggatgggataagtcctcaactctcgttgaacatcttggcgaaggtgtgtgttgttgggaggggtgggggagggatccccccggactgaaccgatctcttgatctctcacttctctacctcgctttggggccctgagtcacaccctctaaggagagaggctaaagcgccccggaaagccagcgtgcgaatgccggggtgggagtgggagattggatctccctggggtccaggaaagccggaatcggagccaccatgcttagcttagtctggaactcttaaaagccgcggtcctcctgagtcccacagcccctctccaccctaggtggcacaggagaggtggcaaaagcctagaagttcaaggcatggctccctccccagccgcagcctggagtgtctaactttggcaggaagtcttccgtttctgctccccactccagagaaaaaataaataaatacttctccggagtgagattaaggaaacaggtacttcttcctcttggagaaagaggagccaaaggaacttgactccaacaaatgatcaccttgcaaacccccggctcccttaggggatgacctggtctccaacaatctcagagcgtttggaggcagggtctttggagatgactgagtggggaatcccaggctccccacacatgaacatcacctgggatgatcaacctgttcaggatgtaggttcccgggctcacccccaggcccggttggctaggcctggggtgaggctgagatcctgcaggttaaaccatctatcccaggtgactccaatgttcgtttgtggggcaaaagtccctcaagtcagagacactgggaggcgctgatgtggtctcatctctttactctctccctgttacaaaacttctatcagaaaaggagtaccaggaggtgttttgttttgttttgcttaacgccacatagcaagcagtttgcagacgcaggatttgaaccctggtctactgagagcccagcccagtgcaccaagcagatgtgaacctccacaaatgcagggcaggtcccaggcagtcagagagaaacctgttgatacccagtctgtctgatggctggggcttggtttcatgtcctaagacccagcctcagataccttgagaagagcagaatcagaaattaacccaaggaaactctggattagttccaggcaatcagggaagtggctggagggaggtaggaaacttctggacttagcctcagatttgccttgagtcacactgacaagtgacttcccctctctgaggttcatctgtaaaatggataaaacatgagagcttgcttgatgatgtctgatgtgtacagaaaaagcactttagaaaaccaccaaagaatattcatgcattgggaataattattatagatcctaaagggattgtttagaaagatcagagaggggccgggagcagtggttcacacctgtaatcctagcactttgggaggccgaagcgggtggattgcttgaggccaggagttcaagaccagcctgggcaacctggagaaaccccaactctactaaaacacttttttgtgttttagccgggcatggtggtgcacacctgtaatctcaactacttgggaggctgaggcacgagaatcacttgaacccaagaggcggagtttacccgagaggtggaggttacccgagagctgagattgcaccactgcacgccagcctgggcaacagagcaagactgtctcaggaaaaaaaaaagagagagaaaaaagtcagagaggaaagcataggcagatgggaggtttccaaagaccaagacacacacagtcaaaagacagttcagaaaggggcattagttaccaccgattctcataggaaggacatagatagttttcagattccttcaatccttctgacatcaaggacaaagtctctgattttccctgatgtttgacagtgccctaatgcttgctaagatttctttttaacaaagtggtaaagaagctgagattattttagtaacattgtttctttttcaaccacaagtgatactgttggtttggttttgcttttccgtttatacatggaaaaaaaagttttctttttgtaaaatcatggtaaaatacatataacataaaatttaccattttaaccactttcaaatgtacatttcagtggcattaaatatttcaaactgttgtgcaacctccgctaccatccatctccagaactttttcatcctcccaaactgaaactctacccaataagcaataactccccactgccccttccacccagctcgtggtaactccaacttcctgtctctatgttttgggctactctagacaccgcctataaatagaattacgtgatatttgtctttttgtgcctggcttctttcacttagcataatgtcttccaggttcatccatgtcgtgccatgtgtaattcctttctatggcggaatagtattctaatatgtggatatcccatattttgttcatccattcatttgttgatagacacttgggttgttcctacctcttgactattgtgaataatcttgctaggtacatgggtggacaaatatctgtctgactccccgctttcaactctagaaagctttcttttaaaatcggtctatttaagtttctttaaaaagttaatttaagaaaaatactaaggtaaattgtagaacaggtgatatgtcaatatgaccccaaaaattgtaaagatggaagacgaatgcctgcagtttgggaaaccggatgagaggaaagacctggaagctattgtaaaatctatgctgagggtctggtgactactagaccaagggcatggcagcagagggcagctgaaagacttcaggaaggaaagatataagaattaagaaaggggcctggtgcagtggctcatgcctgtaattccatcaccttgggaggtcaaggcaggatgatggcttgagaccaggagttcaagaccagcctgggcaacagagcaagacctttttttaggaaaaaaatacataaattaataaaaataaatttttgaaaatacagattccaggccgggcatggtggctcacacctgtaaccccagcactttgggaggctgaggccggtggatcacctgggatcaggagttcgagaccagcctggacaacatggtgaaacaccgtctctcctaaaaatacaaaattagccgggtgtagtggtgcatgcctgtaatcccagctactcggtaggctggtggaggagaatcgcctgaacccaggaggcggagattgcggtgagccgagatcacaccattgcactccagcctgggcaacaagagtgaaactccgtctcaaaaaaaatgaaagaaaatacagattcctgggcccggctgcagactccctgaatagaatcactgggggtgaggcccaggacgctgtgtttttaacacccttcccaggtaattctcactcacagccaagcctgccgatggctggactccgtagtcagatctcagcaagcaggactggctcgtggttcatcttggggtctccagcacccagcagagtgctggcggggggactgtgttaagtagagccggatgggtcaggactggagtgtggggcctggctttgctaactgcagtcacaagatcctcatcactccaccccctaccccagcaccagggtcaggttcccttccaggaaaaacttgttggactcctttccaggtcattgactgcagttaggagtggcatgcagaagggaggctatctggagctgggacagaccaggcaagcggggaagggaactcttatcccaaccctgcattctggacagggaccgaaggtctcctggctgcagctcatacagctcatcttcattctcatcctgggaccaccaggcccctcacccacaataactttaccctttactggcaaatgcacaagctggagatgatggcccattcgagttttaagattttccaagttgttatgaggtcagtgtcctcaatcgggacccagagaagataggtggcttgcctgaactttcagagggggcatctgtggtgtcttttgtggggtcctgtaggatttccacgtccctcttggaggaaaaatagaagtaagttgtctcaggtcagattgtctgggaagccaagtaggagatggagatttgcatataggaggtttactggggacattcacaggagggaacacccgaaggaaaagggaagaaagcagggttgggaagcagcaggagttgaggtgcaatgcagtcacaacagaggtcttagccaatcccatagggagcactcaagctgggacagcaaggaagctagaccttcacatccctcatctacctccgtcctcccatacaggcatagcctcccccatgatgaacactcagcaccagactgatacatttgttataatcaatgaacctacattgatgcatcattattacccaaggtccatggtttgtttacatgagggtttactcttggtgttgtacattctgtgggtttggacagatacatgatgtaatgtatatgacattatagtatcacacagactcatttcacttgtgactgagcttgtccttctttctttaacctgcctccaactgctgagaagccctttggctagggattgcagccaattttaatttgttttccactttcctgctctgaagttactttgtttgccagaggctggttggttcaaacccaaagggcagggagctgcaatggaaatccattcaacggtgctggaattgggatggcaaaaaggagcagcaggcaggtgtcagcagggagcagctctttgcatcccacagttcccagggagcttaccattctttcattcattcattcatcctttcatttatgagacaaagtctcactctgttgcccaggttggagtgcagtggcacagtcattgctcactgcagcctcaagctcctgagctcaagccatcctcctgcctcagcctcccaagtagccgagactacaagggcactccaccacacccagctaatttttgtatcttttatttctgaagagatggggtttcactatgttgcccaggctggtctcaaactcctggcctcaagtcatcctccctcctcagcctcccaaagtgctgggattacaggtgtgatctcagacagcttacctcttaatcacctttccatctgagctggcagcagagctgggaaagtgcacccaacaccccagatgctgcaactttagtgcttcctgctccttctctgtgtggaactggcctgtttgggtacccagggccagtcccctccaagaccctctgtagaaaaagaccctactgtacacctcaattccattgcaggacaggacataattgaatcctgcctctccctgccccagtcacccatccctcccaagccattatcttgggacctgcaagggcctccaagccaagggtggcaaatccaaataccaaaggggccataatgatgtaaaatgtgtccaggcagaaggcaatagggagtagtggggcctctggtaacaattgtgtgtactctatatagagacattgtgatggtgatttagacacacacacacttatattggcttgggaaacaaaacaaataggcctatcgactggattcaacttttgattttgcagccaagcccctgtggcacagctgaggagcttgcaggtcagaaaggggatttagagccaaccaatagcaatatctccagacctctcctgacacgaagctcatctgacctcctgcccccattacacacatacacatgcacacacatgcatgcaggcacatgcacgcacgtcttctagtctccctgccttgaggacaaatgatcagatcctgcaactgtttccaggcccataagcccctgagcattgcagtgttgctacatgccttagtttcctctccgtctcctgtgacctcctcgtgccactccaggaagtgaaagtcttgagtgagaccagtagtttctcttaagtcctctctctgtctcgttctcctgggatatttacacttggtttgcaaacagcaggctggagagtgaggggcttcttcctctacatccagctcctcccccatcctgctccaagtccagcatgttcctatctcttccccaggaccctgggctcttgggcacaaatcaagccatcaccagacagcctgtggggtggcaagagcagaggtttgtttctttgtgaacatctataggtaccaggctctgtgcaggccctattgttggtgagccatagaggtaccaacctcaccccatgaatcctcctttgtttcttttcttttcaacccctgggcctttaaaccttcgattaactgcccagtgcagcccaggtcatggtacactatgatctttggttcacatgagggttttctcttcattaatgtccctatttcccatactgggtgcccattctaatgcatttcaggtgtatctttctgtttgtatgtgctcttataaaacatgttttgcctttttttttttttttttagatggagtctcactctgtcacccaggctgagttttctatttttagtagagatggggttttaccaccttggccaggctggtctcaaactcctgacctcaggtgatccacccgcctcggcctcccaaagtgctggaattacaggtgcgagtcaccacgcctggccacagtttcttacttttgcattctgtactatgtttttaggatctacttgccttgcttctgatgcatttgatctttgcttctaatcacggacattgttctctatggagtgcaggggttacttttcacctgtccacacccccagtgatggacacctaggtgacctccaactctctgtcaccacaaataacacagcagtaaccatcctcagatgggttctcctggggagttgtgggaacatttcttcaggatatatagacccaagagctgaattgccaggtggtaggatctacatatccttagatattctacatgatgccaggtcgttctccagagcggccccatccatctacattcccacaaacccgtgtaaccaacacttggcatttcccagatgtctaacttttgccagttgtacagtatcaagtgtcactttgctgttttatttttggagtttacatcttagtaccacttactcgctaagtcactttaggtaagtcacaacaacccagtgacataagcactgtgccaacaaaatgcagtcgattctgtgactcagagaggttgagtaacatttgcaaagtcacacagcaagtgtggaactaagatttgaacccagagcctgcacccttaaccactatgctattattatgttttgtctctctcctaaaatatcatctgggtctacattgcaagcctctttggcagggactgtgtggtaaacctctttggggccagtaaggaactgagctcagtgactttcttacggggtgctcagtgaatcattgttttacagctttagaggggaaaagtgagagatgtttcttagagtttatctggaggactacagggtgcatgagcaaaagcggaactcatttgagctactacccccacaaagaagctgtttggggtctggtcatggtagataggcattcctaggcccctggcttcccaacaccatttggcccccggaagcagcttgtcatgaggttggggagcaggttggtgttggggggggccttgggggaaaggaaaaggagaagactgccaggcaacgaggaatcagaatctcaaaaagactcaattgaaggggctccaacactcgttgaaacggaggctcagagggctaaggtaatgtactcaggatcaaaggcagagcagaaactcaaaccatgtctctaggcacacagttcagaggtcttcccattattcctcaggaggagaagttcatggtcaagagtagggaagtattccttctcaagcttttttttttttgtctgagacagagtcttgctctgtcaccgaggctggagtgcagtggcgtgatctcggctcactgcaacctccgcctcccaggttcaagcaattttcctgcctcagcctcccaagtagctgggattataggcacccaccaccacgcccagctcatttttgtatttttgcagagacggggtttcaccatgctggtcaggctggtcttgaactcctgacctcaagtaatccgccagcctcggcctctcaaagtgctaggattataggcgtgagccaccacccctggcctccttctcatgctctttaatcacagttcagagcagtgctggaggcttttaggggtagcaaaagagccttcttctccctttcagtgcctccttagaccctcaaagatagactccccgcctctgggaagaaaacatctaatgaactggacgtaatctcagcgcctgcgtctgtaaaatggctataataacaacaatctcccagagttgccgttaacagttgaaacagaatagtaaatgcaaggcatctagcacagccccagacacagagaaatctcccctggtcactctcacagaggtaagaagcacattaataataaaaatggtcatcacgcatattgtactcaccatgcagaagttgtgctgccttaagctactgttcattgagcacttactggtcgccagtcccctttctaagggctccatgcaacttaactcccctaatcctatgagttgccaattattatcccccactttacagataaggaaactgaggctccaagtggtttaaaaaatgaacttacccagattgtagtgcgttggtaggtagggataacctgaaagttgggaaatttcaccccaaagctcaccatctgagctccattcatctcccaccagctgagatggaacgttatgctgttcccagaagagatgcatgcactgatcttcagatagtttaagtctgagttagaacattctggcgacacctgatttccctcgggggagagagaggtgaattgttatttcagacacctgtttagtgtctacacttagcctttcaaatcctgcatgcagtgtgaagtggggatgaaaataaaccccaaaaaggacttttgatggcaaaaagatcaggaatattttctcgagttggatgtggaaggtggtggcccagggggaagcacagtttcaaagaggaccttctaaaaatactgcccatttaccaaaaagacacagaccgcacctctgccctgcccccacatggctcctcaaaaggagaaattgtcttgccacccacgccttccctcgccggggtgctggggggccaacagcaattcaaaaaggctatagagtgggctgagactttggagatgggtagtttggttcaaatctcagcccactaatccctctgagcctgtctcttcatctgaaaaacaggaatacaaatagctgatgtgtaagttagaccaaatggggtaatgcctacgagtcatgtcatttggtacctggcacttgctggacactgtgaattctagttctatatcattgccacggatgaagagaggctgccatgcgcagaaacatgctgagagctgggagaaggtgagctagagggatacagtccctgccctcagggagagctgaagggctctctctcctgccacgggatgatcagggccatcttttccctccatcccgctctggcaatgtggtttggagaaacagtccaatgaaggggcctttgaagcacttcctaagcatctatagacataggaaacttggctctggggatagaggaaggtcccatgccaagattcaagtagatcttggtgtgactgggaggcagctgtggcgttgtggggaaacctagagtcttgggcctgaatttcagctttgacaccctctaatgtaatgggcttcctttgactgtaggcttcccacatagctggcaccccacacagaactcccttggccttctgatgatcctgcaggacaatcttttttgttttttgttttttgttttttttttgagatggtatctcactttgtcgcccaggctggagtgcagtggcgcagtcttggttcactgcagcctctgcctcccaggttcaagcgattctcctgcctcagcctcccaagtagctgggattacagaagcacgccaccatgcctggctaattttgtatttttagtagagacgggatttcaccatgttgcccgggctggtctcaaactcctgacctcaagtgatctgcctgcctcggcctcccacagtggtgggctgcaaggcaatcttcattctccagaactaatattgggaaaactgatgttcagagaggtcaagtgacttggctaaggcatcacagccagaattcagatgcaagctcctaaaccacatgaccttggacaagccatttcactgaggcgtgtgaacctcctctaagctcaaatgggcataacactctaccctgccttttccccagagctttttgggaactcagatggtgtggaggatggaggcagaagtccactgtgagctgcaaatccttgatcacccaagaggaagtgcttaaggtgcaggcttcagtcttagggaagcaggaagtggggcgctgaaatgtgtattgggggcttctgggagggggtttcttcttgtccaggttgagccaatgacgcagatcttaggccctctggtgactttttgcccaggcaacttctcagtggtggtgatggggagcgtggccagaccatccaagctgccctgctggctgtgggggccttttttttttttctgagacacagtctggctctatcacccaggctggagtgcagtggtgcaatctcagttcactgcagccttgacacctccccaggctcaagctatcctcccacctcagcctcctgagtagctggttctacagatgcacatcaccacgcccagctaagttttgtgttatttgtagagatagggcttcgccatgttgcccaggctggtctcaaactcctggactgaggtgatactcctgccttggactcccaaagtgctggaatttctacagatgtgagccaccatgcccggcctatggggcccttcttgttcttatgaagtctgcagggtccccttatgcaaaagaacagaaagctcggcttcacaaagtttgacctcggaagaaatggaagggaaagggtccctttgtcactctcacaaacgtaagaagcaaactaataatgatggccatcacacatattatactcaccatgtagaagctgtgctgccttaaacttctgttcattcagcagttactgattgccagtcccattgctaagggctccgcgtgacttaactcccctaatccttgtgagttgccaattattattcgcattttatagatatggaaactgaggctccaagtggtttaaaaaatgaacttgcccaggttacagtgtgttggtaggtaggggtagtctcaaagttggtaaattttacgccaaagctcacgatacttgccttctttcccttctcaatttatttctctgactgtgtgcttaaccacacagcagtgtcatccagagtttgaagcagagctcatcaataagtgggggtgggctaaatgtctccaggctcctcccttgcggtccctcccaccatcccccatctgtgataccacctgtgtctctatgcttgagcccagacaggacaagggtgatcatttcattgggaacattttgactggggggaaagagcaccagcctgggagtcttggcggggggagtgggggagaaggggcaggggcagccaccgacaggctatgaggtcttgtgcaagtcacgtccttcccggggtctcagtcttgtcatctgcagagtgaaggaaagaggtcaagcttgaaggtccctggcagacccaatgccctgtgagaaaactgagtttgggtaacttattattttatagatatggaattatcttatagaaatgttatagatatggaatcattttatagatatggcccaaagtccaaagtcacacaactcattcacggagttgctaggatcagtctggagctcttgtcacgagatcacactgcctcaaagaggaggcagattgctgcaatgtaggttcttaataaagagcatgggtggaatgggaggcgggcatcaggcaggagctggggcaaaggtgtcttttctcactgctctgagagaacagattttgtgcctgtgtccctgaccaaggggctgggagaggtggagcatctcacccccaaccatctcccagctttggccctgctccaggaaaagggcggtggccccatctttcagttctgcttcctctagtcatggttggctgggatctcgctgcaagccggttatgtttgggttcctgcagcccccgctcaaccgtcatgaacaagtgggcccagccagtgccccagcttggactggaaagatcattctctgtgacatccgggggtctgtgctgagcctctccccaggcagtgaaagctgtggatgcgtgaaagaaaatgggtctctgggccgggtgtggtggctcacacctgtaatcccagcactttgggaggccaaggcgggtggatcacctgaggtcgggagttcgaaaccagcctgaccaacatggtgaaaccccatctttactaaaaataaaaaaattagccaggcatggtggcgggtgcctgtaatgccagctacttgggaggttgaagcaggagaattgcttgaatccgggaggcagaggttgcagtgagccaagattgcaccactgcactccagcctgggcgacagagtgagactctgtctcaaaaaaaaaaagaaaaagaaaatgagtctcaggaatggggtggcaagttgagtgtgtgttttctcatgagcttactcttcaatgtattctcttctgggcccagaacagggcagtaggagcctccctctggtcttccagcttcagggccagctctcctcttacctcctccaggaagctccctctgtttctttccagccttcatctgcatgtcatgtgtggtgggttgaaaggtggccccccaaaagatatgtccatgtcaaatccctggaacctgtcagtgtgactttatttgggaaaagggtctttgcagatagaattaagttaaggggctgggtgcagtggctcatgcctgtaatcccagcactttgggaagctgagattggaggatcacctgaggtcaggagttcaagaccagtgtggccaacatggcaaaaccccatttctactaaaaatacaaaaattagctggtcatggtggtgagcacctgtaatcccagctactcaggagactggggcaggagaatcgcttgaactgggaggtggaggttgcagtgagccgatacagcgccactgcattccagcctgggcaacagagcaagcctctgtctcaaaagaaggcaaaaaaagaattaaagatcttgaaatgacatcatcctggattatctaggtgggtcctaaatccaatgacaagtgtctttataagagaaagagacttgctacatgaggagtaggtgatgtggccactaaagctgagtttagagtgatgcagccacaagaccacaagtcaaggatcaccagtagttcccagcagctagaggaggcaaggaagcattctcccctcgagcctccagaggcagcgtggccctgctgacaccttggcttcaacttctggcctccagaaccatgagagaataaagtgctgttgttctgagctacctggatgctggtaccttgtttcagcagccctgggaaatgaatataccatggaaacatggacctgaaccacggatcctggcaggggccttagagccacacagatgagccttcagcttggctttccccagcaagagctacatgatcttgaggaagctgcttgtcttctctgggtctcaagttcttcatctgccaatggagacaataatgcttacttcctaggttttaacagctttattgagatgtaattcacatatacaatttgcccacttaaaaagtacagttcatgcctgtaatcccaacactttgggaggccgaggagacaggcggatcacttgaggtcaggagtttgagaacagcctggccaaaatggtgaaacactgtctctactaaaaatgcaaaaattagccgggtgtggtggtgggtgcctgtaatcccagctgctcaggaggctgaggcagaagaatggcttgaacctgggaggcagaggttgcagtgagccaagattgcacccctgcactccagcctgggtgacagagactccgtcttaaaaaaaaaaaaaaaaaaaaaaaaaaagtagagttcagtgttcttttgggaatactcagagagttgtgtgaccatctcccatccccacagtcaattttagcacatttcatcaccccctaaagaaactccagacccatcagcagttgttccccatttccttccaaaatccctctctgccaagccctaggcaaccactaatatgctttctttacttaaaaaaaaattaatagagataggcttttgctatgttgcccaggctggtcttgaacacctgggctcaagcgattctcctgtctcagcctcccaaagtgctgggatttcaggcatgagccaccacgccccacccctcctactttatgtctccatggatttgcctgttttggtcatttcaaataaatagaatcatacaatatgtgaccctttgtgtccggcttcttcacttagcattttttttaaggttcatccatgttccagcatgtatcagtactttctccctttaatggtggaatactttattgtatagataagcaacattttgtttatccatttattttttggtggatatttgggctgtttttatattttggctattttgaattatccttctgtgaacattcgtgtataggtttttgtgtggatatatctggtttttcttgttttcttttgttttattaatacataatatgatacatatttatggggtatatgtgaatatttattacatgcatagaatgtataatgatcatgtcaggatatttgaggtatccacatttgggattgtttaaagattaaatgaaatagtgttaaaagtatttaatatgcccttcaacaaatgatgaggaaatcttagaatctgctcagactccttcagtttacatattaggaaactgaggcacagaaaggagcagagacttgctcaagtccacccaaagcagtagagcattgtggttaaatgcaggacttcagtcagactgtctgggttcaaatcctggttccacttggacatgggtttccttacataaatcacttcacctctctgagcctcagttttctcatatgcaaagtgaggataataataataccttccttacatggttactgatatgagtattaaatgtgccagctcatgtgcctggcgtataggaggtgctttataaaccttagctgttaccactcatggcattgccaaatgtgggacgggtctcctgactctctggtgtgagattgatggaatccacactttccagttcccttttctacctcctgggtatcttctcatatggttgtaagttccctggaggaagggaatgtggcttgctctctccaccacgctgagcatataagaggtgctgaatgagcgcttttattcactcctctcatccccagccctcaccagctgggagttgttgtaggtgtcaattttctgcctctttccaacaccctgtgaggtgactgagcattgtcttccctcccaggcagctcacagtgtgccaccatggagttggggcccctagaaggtggctacctggagcttcttaacagcgatgctgaccccctgtgcctctaccacttctatgaccagatggacctggctggagaagaagagattgagctctactcaggtgggccctcctccctctggtctcttccggtatcccccacccctcagcttgctgtagagacggcaatcaggggaaattctggtccctgtcctcccgtcagcaccacggacagctcccacgtctgtgggacgctctctgcagatggggatgatctcccagccctgccccgcctctccctcgttccccaccagccctctttccagaaatttccttcttcatccaagggacttttcctcccagaacccgacacagacaccatcaactgcgaccagttcagcaggctgttgtgtgacatggaaggtgatgaagagaccagggaggcttatgccaatatcggtgaggaagcacctgagcccagaaaaggacaatcaagggcaagagttctttgctgccacttgtcaatatcacccattcatcatgagccacgtcagtcccctcccacagaaatcattgcaagggggatgcggagcaatggctggaggaacggagactccagggaagagaggggagatggaggccagtgggggaaataggccccttcactaatgaccaccaagaaaacaaaatctcatgtttacatcctccacctccatttctatacgcatttctgcttcttgctcttctgtccatcctttctacaaagcccataccatacacccctttcccttttcctcccagctccttagccaagctactctagtatttgtaataactagcatttactggatactcatagtatgctcattgctgtccatacattatcatctggaatccttacaacaacaaaggaaatacatattattagtttctgtcttttacaaatgaggaaattgaggtttagagaggtgaaacgacctacccaagtttgcattagagatagtaatgtacagatctgaaattctaacctaggtctttctcgtttcaaagtctccatttttaaccacaaaaaaagaaagtgtctggggttggaagatttgctaaggcttaagcagagaagctaatttgtagccttaagaagagctacagctttcagacaagggcaggactcttggggagaggtggtggtggtgttgctgctagtggtttgttttttgggggagagacgtgggatagagaatctcttctcaccagcatcaccaccacctcatacagagcctatgttgaaatagaaaaaagtggcctttttctggaggatgcagcccctaccaggaagtaactgcttggctagcaaagtgcaagccggagtcctgcccccattttccttgttggcttgggcacctgtgtgcagtgaacaacctgcaaaactcttcttagtggtcttcttcctgccaacccaggaacagcagcattcagcagttctgtgcttgatccaaatgtggccaatttttccccagagcacagtgtattgaaaatcataccaaggaagaaaatggaggggactagtaattgttcatgtttcagaaattacagaactgagagcttgactgcttccttcccttcctggggatttacatgggggaagcagaagtgattggggctgaggacattcacatttcctcacaactggaggcagtcattaaggatttgggcatgtcataggatttgggtgtttttctccccccttagtggcatctccacaggcagcgaaagctgtctaagcaaataggtgaggcagtgcgttagtccattttttgttgcttaaaacaacatacctgacactgagtaatttataaagaaaaaaaatatttcttacagttatggaggctgagaagtccaaggttaggggctgcatctggtgagggccttcttactggtgaggactctctgcagagtcccaaggcagtgtggggcatcacgaggcaagaggtttcggtgtgatagtctctcttcctcttctcataaaaccactagtcttactcccacgacaacccattaacttattaacctgtttatccactaatccatgaacggattaacccattcatcaaggaaaagccccagtcacctcttaaaggccccacctctcaatactgccacataggggattacatttatacatgagttttggagaagacaaacattcacgtcataacaggcagcttcacccaagtctgctcctcaagtctgtgggttttctctctgcttctggaaggtgaagcccaggcctgggcaagtattcttttgcagcatcctgaaatatgaccttagcttctaaatgtgtaaaatggagataataatcacacccaccatcacgggatggttgtaagactgaataagttacaatgtgtaaagcatttagaaaaggaatttgcacagagtaagcattcagtagatgataggtactaccccacaaccaccgttatcattattatcaccatcattattatcatcttcattttcatcaccttcattatggccatcattccattcctcagctcagaagccttctatggctccccattgcttataaaatcaagtcctaactttccccagcatgaaacttctaccaccgtcacctatctctcagggtttcctaaacatactctgaacaagtttcctcactctgccactgtgacccagaaagctatctgttctccttctcccagactctgcctcatctttcaaggcctggttccaggatcccttcctccaggaagccttccctgattgccctattccaccatacaccttttttctcggacttcatgtcatggtgcctatattccaagggctctgagccatgtacccctttatatagttaccactatttactgagtgcctactgtataccagctactgtgttggatgctctagatgtagaacctctaattatcaccatcgattcctgggtagtaggcattatttattcatcttacacagatgagaaaatggaggcccacagtggttaaataactagcccaagattgcacagctagtagggctagtggaaagtagaggtggaatttgaactcaaatcctgcagtaactctaccattctgccttgctcttctttgtagcagtagataagttttcatggatacatacctcatccttttgattagattaagggcccctggagtgtcagtgttcattcatttgtttgatcattcattcattcaacaaacatttcttgagtccccactgtgtgccaggcccagaggttccccagcccaaggcctggcacacagtgggccttcagttagaccttgttgattgactgcgcttttccttgtctgggcagcggaactggaccagtatgtcttccaggactcccagctggagggcctgagcaaggacattttcagtaagtttgtggtgggtggggaggtcttggctcagcctgcatttcctgccttgttccctggggggtgccctaatacctgacgaccattcattgatgggcagtcagacccctctccccaaggtgggtacaatagagactcaccttgggctttcattgattgtgtgagttggtctctggtttttctcaaagtagagcacataggaccagatgaagtgatcggtgagagtatggagatgccagcagaagttgggcagaaaagtcagaaaagacgtgagtgagcccctccctgatccaacctagccttgcttgagacctggcctttccttgactccaaagcctgctgtgggtccaacttgcttccctcgctaagtcctgtctggttgggaggccctttaaaagccaacaggagccttaaaatgtacatctgattatttcatggccctgataaccctccaatggctacaaaatacatgccacaaggcctgtatggcccttcctccctctccaaacccactatgagacaccacacttcagccaccaccagcttctccactcctataacccatgtgccctttcaagcctcggggcctttgcagttgctatagtctctatctggaatgcccttcccccagttcttcccatggctgactcctttgaatctttctggtgttggctaaactgtcacctcttcctggaacccttctctgaccatccttccatgtagattagctcagttattctcaccttgtgtgtctttttccttgcagtttagcactcattaccatctggacatattttacgccttgctctcccactgtgaggacagggaccttgtctttcttgctcgtgactgtttccccagcatctagtgcagtgcctggtatgcagtagcacctcaatagatatctgttgaatgaaaacatctgtaaaatgggtgtaacagttaactgagtacttattatgggtctgaccatgtgtaagtcctgtatctatttattcagttcttaaacaggtgaatcgcacacagggtatgagattttaaaagtgcaaagaatattcagtgaaggctgggcgcagcggctcacacctgtaatcccagcagtttgggaggccaagggggacggatcacttgaggtcaggagtttgatacctgcctggccaacatggtgaaaccgcgtctctaccaaaaaatacaaaaattagccgggtgtggtggtgcacgcctgtaatcccagctactcgggaggctgaggcaggagaatcgcttgaacccaggaggtggaggttgcagtgagctaagatcacgccactgcactccagcctgggtggcagagtaagactctgtctcaaacaacaacaaccaaaagaatattcagtgaaaaaaaaatctccctcccactcctgttctgtagtccctcagttttgctcctatcttagtcaacctatgtgaccagcttcctttttgccttgtcagaaataaagcgagctcctgtatttgctttaattttccatgcaaatgaccacattttatttacactattctgcattttgctttcttcatttacttcattactccctgtctgggaggtcacgttccatattattgagggagaggacacggtcctatcttcagcagnnnnnnnnnnnnnnnnnnnnnnnnnnnnnnnnnnnnnnnnnnnnnnnnnnnnnnnnnnnnnnnnnnnnnnnnnnnnnnnnnnnnnnnnnnnnnnnnnnnnnnnnnnnnnnnnnnnnnnnnnnnnnnnnnnnnnncacggtcctatcttcagcagcttctttattttctttcttttcttgtttttcttctttatgttttcatttgataaatatttccccccaagattttattgtgaaagttttcggccaggcgtggtggctcacatctgtaatcccagcactttgggaggccaaggctggcagatcacctgaggtcaagagtttgagaccagcctggccaacatggtgaaaccccatctctactaaaaatacaaaaattagccaggcgtggtggcgaacacctgtaatcccagctaccagggaggctagggtgggagaatcgcttgaacctaagaagcagaggttgcagtgagccaagattgcgccagtgcactccagcctgggcaacagagctagactctgtttcaaaaaaaaaaaaaaatgttttcaagatacaataaaagtgaaagaatggtactatgaaggtccatatacccaccatgtaccattttgattctacaattaatgttgggttttattcatcttatcacatctctattcatctgtccatccctctatccatccacacacccattcattatatttttggtacatttcaatgtacatttcaaacgtaaattgcagatttacactcccctcgtgtacttcagcatcctttcttttaaggccatgcagtgtttcgttgggtagatgaaccataatttgtttaagcagtcccttgctaagggacacgtgggtttttaatctgttgctgtgagtgcttgatactcactcactgatttctggcatactcctgcaatgtaggaaccaccacccccatttcatagatgtgagatcaaaggttcagagaagctgcattgcaaaggcacacagctaggaagcggttcaaaagcaggttcctttgttttgttttgttttgttttttggctcaaacccatgttgtgtccccatttgtgactcggcctcttctgctgctacactgcctggtatggtttgagatggggtttgggttcaagccaaggagctggggttggaatgttagagcgaggggaggaaaatggacccccaagaccactacccagccttgaagttaaggccgtatagcctgctagagtcctgagccccttctggcttgggacatcctctccctggggcagctgatcacatgttttctctgcagccttcccagaggagcttccggcagacctgaagcactggaagccaggtgtgcagggcaggtgggctggggttgggaagggtggatgccttggggaggggatggaagagattgaactcctggcccaagtctgatggggatggtgcatggtgcagcccctgcccttctttgggtagaggctgagagcttggggtcccttagagtcctctaaggggctcacgactgtttgtggaaggtggtaggggcttggagctaacagattgttcataggttctattctgccccagctctccgtgtggaggccctagggtcctgctcagcatagctctcagagccaagtcacaaggagaggactgggggactgcctggcacagagcagttgctgatcaacacagctgcagccagggctgagaagatgacaagcatttcctctgtcaggagagacatccatgccactccagggccctccccatcccaggaaggcccctccaagcacccagtctctaacacagcccacttcctcacagctgagccccccactgtggtgactggcagtctcctagtgggaccagtgagcgactgctccaccctgccctgcctgccactgcctgcgctgttcaaccaggagccagcctccggccagatgcgcctggagaaaaccgaccagattcccagtatgttagggggcttggagagagtgggctttctccctcttgggaggtggataaggagttgacactaaggcagggactgtcaggaactggacctcacctctccccaaccctatcagtgtcactcacctctgccccagccagttttatccttggggcccccgtcagctcaatccctggcagagaacatgcctcagaaggaaacacatccgtgcgagcatcaggagggaatctccaccaattagagcattcacctgccagccttattcgttcatcagctcttcatggagcccgttctctgtgccaactgctctgctaggtgctaagaattccatcagggcaggacagaaacagctactgctcttagggaaattagggccctttaggggggtcagacattaatcaaataagcaaaagcagaatcgcaaacacaggtgctatgcaagatcccacctcactgcctttgtctcttgcagtgcctttctccagttcctcgttgagctgcctgaatctccctgagggacccatccagtttgtccccaccatctccactctgccccatgggctctggcaaatctctgaggctggaacaggggtctccagtatattcatctaccatggtgagtgcggggcctggctccccgaccacctctccctcctacctgactgctccctgacctcatcctccccatactccatgcacttggcagtggtgccctagcaccttctcatgatcctccctccccagcacaactttctctgtccctatttcccaaaaatcaaagcagaagagcagagattcctgaggtggtctgggtgcatgaccaagagtggttgtgtggccttccatatgttgctttccccttctgacccttagtttttccttattttttttaaatgtttttgtttttaaattgcaacatcaatacatgctcactaataagctaatgacaagtgatgtttacaagaattcactgtctctctcactcttttagtatactgatgtgaatagtttggtgtgcatccttgcatagctttctctgatttgtcttgtttcctaatcagtaaaatggtccctactgacccaccacactgaggggttgtgacttgtctcagggaaggtgtgttttggctgtcagggatgagaccaggaggatgcttccactcaagtccagagcatccattcctggttgcaagacagtttcagtataacgcactggtatctcagaagcagagaagcagttcctgatgtctaggaaaatgagcactgaccacacagcaggaagagtgcaatagtagtacctgccctaagttccttatgagctaattgcacccatttcacagattggaaaagcaaggttccaggagctagatgtaactccagagctctttcttcagctctgtcctgaaatatcttcctttggaagttctactctcttctctccagacttcctgagctccacagcccagtttggagtaggggtgacccaagtgcatttctggaatcaatacctggttattctcacaccactctccacccccaatgtaggtgaggtgccccaggccagccaagtaccccctcccagtggattcactgtccacggcctcccaacatctccagaccggccaggctccaccagccccttcgctccatcagccactgacctgcccagcatgcctgaacctgccctgacctcccgagcaaacatgacaggtaaggacccttagggcctgtgagaggtactagaagcaggatcgaggccctggggaaggaattgtctcaaataagatccacaagcaaagctgcctgtagggacaacaggtcatgtttaggggtcagtcgggacagggagggtctccagggagtggaggcatggttgtgggggaatggacagctagagaatccacatcccatccaaatacagccatcagccttcagctgcttgttacccagcagaaaagccagacaatgtggtcagatcttttgaagttgaaaaccctgatttttacatagatattgtgattttttaatttttattttattatttatttattgttgagatggagtctcactctgttgcccaggctagagtgcagtggtgcgatctcagatcactgcaacctccgccctacaggttcaagtgattctcctgcctcagcctccggagcagctggaattacaggtgtgcaccgtcacacccagccaatttttgtaatttcagtagagacaagtttaaccatgttggccaggctggtctcgaactcctgatctcaagtgatccacctgcctcgacctcccaaagtgctgggattacaggtgtgagccactgcacccagcctgatattgcgattttcttttttaaacatgagtgaaatttttaaaagtacagttggccaaagaaagacatatttgagttagatacagcctcaggccgctatcttataacctccatcttgggaaactcagcccatgaaggctgtaaggactaagtggcccagagggaggggggtccccaggggtaaccctcaccctaaatctggcacctgcttctccatctccagagcacaagacgtcccccacccaatgcccggcagctggagaggtctccaacaagcttccaaaatggcctggtgagtgatgcgggatctctctgccctgggtggtggagatggaagcccatatctggcttcacattgctcattcacttgacacttattcaaccccttctttgttggctcacacactcatttatttattcattcattcattcattcacttatttgattatgccatcatttcaccattcactccaccactccctcaaataatatttattgcccttcaataagcctgcactgggtgttaacacttcattgtcaggctgagagaatgaatgaggggcaagcgaatgatgaagtgagtgagtggatgaagtgagaagttgatgaggatgggagcaatggaaagtgggaataaaccagtgaataagagaattactaaattactaaatgcttactctcacatactggtctaagcatgttaggtatgctaaatcattaacatctcacacaatcccaatattatccccattttccagatgaggctactgaggcatggtgggatgtatagcatgctcagaattgctccagcaagtggtagaaccgggatttgaacccagacacgtgggctccactgtcttaactcttaacactccctcccatgacctccccatggtgagtgagtagtgatcaagcgaagaaaaagcttagtgagtaaatgaaggaatgagaaaagatggccatgcatggtgccttatgcctgtaatcccagcactttgggaggccaaggcaggtggatcacctgaggtcaggagttcgagaccagcctggccaacatagtgaaaccccgtctccattaaaaaatacaaaaattagccagacgtggtagtgggtgcctgtaatcccagctacttggcaggccgaggcaggagaatcgcctaaacccaggaggtggaggttgccgtgagctgagattgcgccagtgcactccagcctggggcacagggcaggatccatctcaaaaaaaaaaaagagagaaaaggtctaaaaggagtggacacttaaacaagagagaggatgagtgaaggaatgggtgtggaaatgagtgaactaatgaatgagtggtgggtgactgaatgaagcaaatgatgaagactgtatgggggccagatgtggtggctcacacctgtaatcccagcactttgggaggccaaggcggaacgattgcttgagcccaggagctcaagaccagcctgggcaaaatagtgagaacttatctccacaaaaaaacaaaaaagaaaaattagccaggcatggcagtgggcgcctgtagtccccagctactcaggaggctgaggtgggaggattgcttgagcctgtgaggttgaagctgtcgtggaccatgattgtgccattgcacgccagcctgggcgacatagtgagaccccatctctacaaaaaaatcaaaaaattatctgggcatggtgtcacatgtctgtggtcccagctacttgggaggtggagtcaggaggatcgcatgagcccaggaggttgaggttgcagcgagctgtgatcacaccactgcattccagcctgggcaaaaaagccagaccctgtctcaaaacaaaacaaaacaaacaaacaaaaaaactgtgtggggaacagatgtaaatgatggtggcagtgctggccttgtggtggctggccctggccctgcctctcacatacccccaccctgacacgcccctggcctttgcagagccggtggagcagttctaccgctcactgcaggacacgtatggtgccgagcccgcaggcccggatggcatcctagtggaggtggatctggtgcaggccaggctggagaggagcagcagcaagagcctggagcgggaactggccaccccggactgggcagaacggcagctggcccaaggaggcctggctgaggtgctgttggctgccaaggagcaccggcggccgcgtgagacacgagtgattgctgtgctgggcaaagctggtcagggcaagagctattgggctggggcagtgagccgggcctgggcttgtggccggcttccccagtacgactttgtcttctctgtcccctgccattgcttgaaccgtccgggggatgcctatggcctgcaggatctgctcttctccctgggcccacagccactcgtggcggccgatgaggttttcagccacatcttgaagagacctgaccgcgttctgctcatcctagacggcttcgaggagctggaagcgcaagatggcttcctgcacagcacgtgcggaccggcaccggcggagccctgctccctccgggggctgctggccggccttttccagaagaagctgctccgaggttgcaccctcctcctcacagcccggccccggggccgcctggtccagagcctgagcaaggccgacgccctatttgagctgtccggcttctccatggagcaggcccaggcatacgtgatgcgctactttgagagctcagggatgacagagcaccaagacagagccctgacgctcctccgggaccggccacttcttctcagtcacagccacagccctactttgtgccgggcagtgtgccagctctcagaggccctgctggagcttggggaggacgccaagctgccctccacgctcacgggactctatgtcggcctgctgggccgtgcagccctcgacagcccccccggggccctggcagagctggccaagctggcctgggagctgggccgcagacatcaaagtaccctacaggaggaccagttcccatccgcagacgtgaggacctgggcgatggccaaaggcttagtccaacacccaccgcgggccgcagagtccgagctggccttccccagcttcctcctgcaatgcttcctgggggccctgtggctggctctgagtggcgaaatcaaggacaaggagctcccgcagtacctagcattgaccccaaggaagaagaggccctatgacaactggctggagggcgtgccacgctttctggctgggctgatcttccagcctcccgcccgctgcctgggagccctactcgggccatcggcggctgcctcggtggacaggaagcagaaggtgcttgcgaggtacctgaagcggctgcagccagggacactgcgggcgcggcagctgctggagctgctgcactgcgcccacgaggccgaggaggctggaatttggcagcacgtggtacaggagctccccggccgcctctcttttctgggcacccgcctcacgcctcctgatgcacatgtactgggcaaggccttggaggcggcgggccaagacttctccctggacctccgcagcactggcatttgcccctctggattggggagcctcgtgggactcagctgtgtcacccgtttcaggtggggtgaggggcttggggaagagacatccttgtgttgggcattaactgcggtcttggtgccaagcccagtgctctgtggggtctcttttagtatgcagagcagccgggtggggcagaatggattgtctccatttttaagatgaggatgttgaggctcagagaggggcagccacttgccacacagcaagtgagaggcaatggcattctcccagtcaatatttgaaggcccgccatgtgccagtcactggggtatgtctagaatctgagactgacctgggctcaaatttgttttattctttccaccccctgagcacgccaccgttttcttatgctaagagtaaagccatggcctccccttggactctctgcctccattctctcctcttccactccattttgtattcagcaaccagaccaatcttctcagaacttgaatctgattgtatcccatccctgcttacaatccttcagggacactccaccactgtcaggatgaaggctaaattccttaatttggtttcattaagtcggtctgcaatctgcttgagcatttcagcttaatcgccagaggattgcttccatatttccccctaaacatactttacccaagctgtaagatcctacataattgtgccaataatttagcagtgagcttcctggtagccgaagcaaaaagggaaagaaaaccactgtgtgagttgtgagaaagtaggaatcaataaaggctggagtggtcatggaaggctttctgggaaaggtagaggttgagctaaggaaagaaagtattttaataggtaggaggacccttcatggagctgcccttccattaaggtctagcctggtcaccgtgcctgggtctgaggccctccctccacagggctgccttgagcgacacagtggcgctgtgggagtccctgcggcagcatggggagaccaagctacttcaggcagcagaggagaagttcaccatcgagcctttcaaagccaagtccctgaaggatgtggaagacctgggaaagcttgtgcagactcagaggtgagaggagaggcggatgggaggtggttcacgccatgcaggttgaggacatgtaggacccattctcaagtttgtcatgggcatttccagtgccccctgtcctctgggacaccccatgccctctttctgggcaatggctaaccagagtctctcactgcactcgctgcccaggcggagcctctagaattgaaaactttgctgcattcaaaacctgccatcatgtgcccaagtcttagctaaagccatggagaacctctccccttctaggagttaacaaggatgccttgtgcacctagtaacagaagtgacacctactgccaccctttgaggcatttaggacaactgttgtcccaaatttatagacggcagagctaaggtccagaaggcagacaaaacttgattacagaacaagttaactgtctttcattcattccttcatcacacattgtttgagcgcctcttaagtgctgtctgggataggtactggtaagtgcctaatctgaggctcatttccatgaaagatacagtcctgagatcttttatttttatttttattatttcttaaagacagggtctcgctgtgcctaccaggctagaatacagtagtgcgatcatagcttactgtagcttcggaactcctgagctcaagcgatcctcctgcctcagcctcccaagtagctgggattataggtgcacgtcatcacaccggatgattttttaagtttttgtagacacagggatcttgctatgttgcccaggctggtcttgaactcctggcctcaagcaatcctcctgcctcagcctcccaaagtgctgggactacagtcacgaggcaccgcacccagacagatcttttttttttaagagggggacaacagttgccccaaggaaagcaatccccctggggaatttggggcactggggcagccatcatgggacccatgggtaagggctcagtgacagcagtgcctgctccccctaacattgcctgttctctccaggacgagaagttcctcggaagacacagctggggagctccctgctgttcgggacctaaagaaactggagtttgcgtaagcaaaggggtggattgtcttgtgggtctgcgcaaggtttcccctgcagcattagctgggcttgtaccacctgaatggagatagatctccagaatcattcttaccctcttgcccaccactttggaaatagcttccagcagctggaaagtgaccagtgtgggcaaatgctggaggttctcagatttgaagctaatggacccgtttgctggttaacatggtcattcccatcactcattcaacagacgtattgagcacttgaatgactgaggctgctgtcctcatgagctgacagtctaatcaactcccctctggaggaggtcagggggacttcctggaggaggtgatatctgcactgaagcttcagtgaggataaggaatgagctgagtggggagaggggagtaagaaaggctttccaggaattgtaatttggccagggatcagaaaaggcccaatgtgtccccaaccttccataggaggatgccactatgactatggagtccttttccctcctgtggccaggaactgcacaacgtcccttgtgcctgagcttgtttacttccacagccaagggatggcctccccagggagaatctttcccccattttgaaattcccaggagcttttgatgtgcagctaggatgaaaaagcaaccctacttgcctgggactatcctggtttgaaaactgaaagtcttgcatcccaagaagcccttagtcccaggcaaactgggacagttggtcgctctatgtgtggccagggctgggggccaacaccctaggcagtgctgctggggtgacagaaatggagacctaggcaaggctctagggagtccagttgtgtctgggtcactgaggaggggcagcccaccatacatgggccccaagaaagcacaataattattatatttagatctgtcagtatatagcttttctttctttctttcctttctttctctctttctttttctttctttcttctttctttctttctctctttctttcctctttctttcctttcccttccttttctttccttccctccctccctcccttccttccttccctccctcccttcttcccccttttcttctttttctttctctctgtttctttctttctttctctctctctctcttccttccttcctccctccctatctctctctttctttctttctttccttcttttctttctttcctttctctcctttctctttctttctttccattctctttctttctctttccttccctcccttccttctcttccttccttctttttcctttccttttcttttctttcttgaggcagagtcttactctgtccctcaggctggagttcagtggcacaatcacagctcaccacagcctcaacctccctaggctcaagtgatcctcccacctcagcctccctagtagctgggactacaggcatgccccacctgactaatttttgtattttttgtagagacaggatttcaccatgttgcccagtctggtctcgagctcctgggctcaagcaatcctcccacctcagcctcccaaagtgctaggattacaggtgcgagctcccgcacctggccagaacaggcttttaaatttgcagctcaccttccatctcaattatctcaggccaccctcctctacaggcattgtcatcatctccccattgtacaaatggcaatgctgagaacaagagactttaaattgtttatccaaagtcataaaggtcaggtcagcctggccctaagctccttccacagaaaaagctaaatgaatgtttgttccttggtaggggtctagatcatctaatgattaggaaggagttgttatgcctgtggtatattcggtgctgtttttttttggagatggggtcttgctctgtcgcccaggctagaatgcagtggtatgatcttggctcactgcaatctccacctctcggttcaagcaattttcctgcctcagcctcccgagtagctgggattacaggtgtacaccactacacctggctaatttttgtatttttagtagagacgggctttaaccatgttggccaggctggtcttgaactcctggcctcagatgttcctcccacctcagcctcccaaagtgctgggattacaggcgtaagccaccacgcccagcttataattcagtgcattttatatataatctcattaatctcaagagctactgtggaagacagacagtcatcatcttccccattttacagatgaggagacggaggcctggtgaggttaagtgacttgcccgtggtcccccagctggtcacccacaagctatcagctctccctgatcactgctcccctgtgccccagaaaaaagccagtgtctcttgttttgaacagagacaaggtgctaaatttgtccagaggtaaaaatgatgctgaaaagggggaatgtctgaaaacaataactgagggccctttctggccttaaattattttcagctgaaaaagcccctagttcaagatcggaactgcgctctggggaacagcggccatggggtggaacagcctagagccgggtgatcagccacctggagaccggaagcccccgaggaggttctgaggaaggaaggaaggaaggaaaagactatttctggcattttctcaggcttctactgtgcccaggcaccctgtagacctcatctgtctgtcaaatcagggttcttagccactcacaaccctacagggacttcgtttgtacacagagtccttccccagttcagtccccactcacctgttcacccttatctcctacactcgctgggtgctctctccattccagccacagggcctccttgctggctttcaacctcctaggcatgcttctgcctccaggcctttgcaccggctgtgccctctgcctggaatacttctccccagatatctgcatggctcatgccttcacctcctctggtctttactcagtgaggccttttcttttctttctttccctgtttctttctttctttctttccctcctttctttctttctttctttctttctttctttctttttccttttttnnnnnnnnnnnnnnnnnnnnnnnnnnnnnnnnnnnnnnnnnnnnnnnnnnnnnnnnnnnnnnnnnnnnnnnnnnnnnnnnnnnnnnnnnnnnnnnnnnnnnnnnnnnnnnnnnnnnnnnnnnnnnnnnnnnnnnnnnnnnnnnnnnnnnnnnnnnnnnnnnnnnnnnnnnnnnnnnnnnnnnnnnnnnnnnnnnnnnnnnnnnnnnnnnnnnnnnnnnnnnnnnnnnnnnnnnnnnnnnnnnnnnnnnnnnnnnnnnnnnnnnnnnnnnnnnnnnnnnnnnnnnnnnnnnnnnnnnnnnnnnnnnnnnnnnnnnnnnnnnnnnnnnnnnnnnnnnnnnnnnnnnnnnnnnnnnnnnnnnnnnnnnnnnnnnnnnnnnnnnnnnnnnntggccaacatagtgaaaccccatctctactaagtatacaaaacaaattagctgggcatggtggcaggtgcctgtagtcacagctacttgggaggctgaggcaggagaatcatttgaaaccgggaggcggaggttgcggtgagctgagatcacgccactgcagtccagcttggatgacagagtgagaccccatctcaaaaataaataaataaataaataaataaataaataaaactccattcccctcatggttaaaaaaaaaactccatccccctcaccactgtatatttccatatgattcattgtctcagacatcagcttgctttccgatttctttgattatctgtctatcttcccccctggaatgtcagcacccagaaggcagggattttcgtctgtttggcccacaactttcctccctgggcctggcacatagtaggcaagcggtcaatatttaacaacgaatgccttaatccaagaacccccataagattggggtgaaatatttgaggagatcaagacttaagggtgaagggatttgccaaggcctttagcagggagccaaatgccagatcctggagtcaaactctgatcctgtggccttttgctgaggccagtgttctcagacttcaggatttcagaggccgagaacatttcggaatgaattcaagtgaccgtgcgcggttactgttttttaatgtttatcaaggatgctcattcaaacaaacaaataacaacaaaatacccactgctggcaccataattttaccaaagaatgatcattctaatattgaaaaagttcaaaggacataattgcagaataaaagacagctctttatatggaatgcatttaaccatatttttaaactaaacggcccttcgttgtccttatttttctcatccccttgaagtctgctctaaatgttgatccaggctgtgtgaccctgtgtgagctatttgatcgcctagtgcctcagtttccctatatgtaaaatggagataagagcccatagctcagagtcttgaggagtaaatgagatctaggccgagggaagggcctagcatgcccctggcttataataaatgctcaacaaatggttccttttgttattaaaatgcaaaggcatattagtcaaccacctggtttaccactggcagtggtcgtcagctggcatttcaggaccccttccccaggctgcggcgggagaagggtatctgtggatgttgggaagagtaagaactggctccctacttagagacaaaagctggggagccccaagatgggagcccaacttacctctttttcttttctttttttgttttttttcttttttgagacagggtctcgctcttacccaggctggagtgcagtggtgtgatcatggctcactgcatcctccacctcctgggctcaagcgatgcttccacctcagcctcctaagaagctgagaccacaggacacaccaccacactcggctaattattgtgttttttgtagagactgagtctcactatgttgcccaagctggtcttgaactcctgggctcaagcagtcctcttaccttggcctcccaaaatgctggaattacagacatgagccactgttcccagcctcaactggcctcttatggggggctatgaaatctaccccaagcagaagagattggggtcctacgtggaagggttgcagggacctaagaggctggggtggaagggaagaggaggggcctcagacaggacctgacttctgtgccttgtctctgccccaccctggggctgaatgaggggctgtgactgtgactggaggtcttacccttgctctttgcctcctaggctgggccctgtctcaggcccccaggctttccccaaactggtgcggatcctcacggccttttcctccctgcagcatctggagtgagtatagactctgggaccccttcctctcaacatctgggtgcagtgctgtgatcatagctcactgcagcctcgaattactggcctcaagtagtcctcctgcctcagcctcctgagtagctgggaccacaggtgcatgctacagtgcccagcaacctctgggttttgacaaccccaaatcctgcccccaaggcacctgcagaaagaaaagccctcactttgtccctttttttctctcttccgcctactgcatcctcaatgtggctggcacatgagtgatgagatgacgccacatcagatgggaatccccagtgacaaaaaaagttgtagatcctttcgtgacctttgaaactcctttcctcacaacctcatttgctgctctcagcaattcagctggggagggattggggagcatagtcctactttacagtggaggttaaggaagttgccaagcctcaggggcttagttcctaagaagctaaacagggattcaagtccatcatgagttagactttgccctctggctgcctggttggagcccccaggtgatgaagtcctcgtctgaaaagctcaggaatgtgccggctgcctatggtgtattagagctggggggtgggaagggcaggtgccagggctgaggaggccctcactgggatgggaagggtcagatggccccaggacgctagctgatggcccccatctgattccacctgcagcctggatgcgctgagtgagaacaagatcggggacgagggtgtctcgcagctctcagccaccttcccccagctgaagtccttggaaaccctcaagtgagtgagctgggcctgcccttcctgctgaatcgggcccccaaagtccggctgactttttcaaaattaatttaaatttgtttttttagacaagggctcgctgtgtcacccaggctagaatatagtgctatgatcatacctctgcagccttgaactcctggcctcaaggaatctcctcacctccgcttcccaaagtgctgggattataggtgtgacttaccatgcccagccccagtggattcatccattcactcattcacctattcaatcagccattcatccttccattcaatgattcatccattcactcatgcagtcatttctttactccctcatccaaccactcactcaatcatttctttacttacccaaccatttattaatttaatcaacaaatatttaaggaggacctactatgtgcaggcacctttctaggccctggagacccagctttaaacaaaacaaataaatcccctgacctcaggaatcttaaattctagtgaggagacacaatgaacaagtaaacaagtcggtaattataaagtatacagtaatgaaaataatgtttggtgacagaaaattatactggggggtgaaataggagagatagattaggatttatcaataaagcattattatcaaaacagtaaaactttttaaaaactgttctgggctctgggaagttggagatggataagatacaggaggatcaatgtgattttttttctttttttcagacaaggtctcgctctgtcacccagggtggagtgcagtggtgtaatcatggctcactgcagcctcaatctcctaggctcaagcaatcctcccatctcaaccttctgagtagctgggacaggtgcatgccaccacgtcccgctaatttttgtatttttttgtagagacgtggtttcaccacgttgcccaggctggtcttgaacttctgagctcaagccatcctcctgcctctgcctcccaaagtactgggattacaggcatgagtcactgtgcctggttcaatgggatttttttttttttttttttgacacggagtctcgctctgtagcccaggctggagtgcagtggtacgatctatttattgcaaacttcacctcctgggttcaagcaattctcacacctcagcctcccaagtagctggaattacaggcatgcaccactacacccaactaatttttgtatttttagtagagacggggtttcaccaggttggccaggctggtcttgaactcctgacctcaagtgatccgcccacctcagcctcccaaagtgctgggattaccggcatgagccaccacgcccagttcaacatgattttttactgaacctagaggatatcaaaatcttcccacactccccctcacaaccaaggtcttagaatggccaaataatttaccggaatttacttagcaatttccttaattgtaggactgtgggacttctccagtaatttctagtgtcctaggtaacactgtaagctagatttcttctccttagtccttccgtccccctctttcttacccgccaccccacttaagtatttattgagcacctactatgtgcctggcagtgctctaggcacagggatacagtaatgagcaaaacagacacagccctgctccatgtgaagcccacaacccggcagaaaggattacacagccattaaacaaataatgccaacacttatttcattatagtgctgaaaagtggcgcagagggaaaagaggggatgttgtaaagtcatgggacaggtgggggcaggagggtgcactctccctcccatccacctcctcatccctgccctcccacttggccacaggacctaacagtatcctcctgtttaccgagaggtagcttaagtctgtcgacagcgccattcacagcctatgacccagaactctccttgaggtcaaagtgaggcatgcaagtttggtcctgagccctccccctcactgtgtccccgcagtctgtcccagaacaacatcactgacctgggtgcctacaaactcgccgaggccctgccttcgctcgctgcatccctgctcaggctaaggtgagtggggccccggataccggtcaggtgctgagctggggggctgcagagcgcagggaacccacatcgtgctggctgcaggggacactgagaccctagaagcaatcaccacagccctgaacaaaaggattagcgggacgtggtgaaagaaactctgagcaagtcacttattcattcctagcccctgttttcttacctggaaaatgggaaccatcctaatggtctatgtaagcacttgtcacaatgccaggttctgttatgcaataaatattgctccttttcccccagggatggcgggaccaggctttttccggaacctaggggtggtggcttctggaaggctaaccacgcacgtcagcttttgccggccttgtcacttacatgccggtcagtgtttcactgccaccttctggtaggccttggcatagcacctcttgcttttgagtgacttccatccaggccctggtgtggtcccagaggtaatgagcggactgagcttggaccagagccccagtcatccaactcagcattaccagctcttcttactcgccagactgagagaaactgctctcctcttcgccagagctcttcacttactgaggacaaccagagtcagattcccaggaaagatggcatttggtcccttattatttatttatttttaatttttttaatttctgtttttgagatggagtctcgctctgtcacccaggctggagtgaagtggtgtgatctcagctcactgcaacttctgccccccaggttcaagctattcgcctgcctcagtgctccgagtagctgggattataggcgcccaccaccacgtccagctagtttttatatttttagtagagacagggtttcgccatgttggccaggctggtctcaaactcctgatctcaggtgatccacctgcctcggcctcccaaagtgagtactaggattacaggcgtgagccaccatgcccggccaacttatttatttatttatttatttatttatttggagatggggtctcacccaggttgtagtgcaggggtgcaatgatggctcactacagcctcgactacctggactgaagcgaacctcccacctcagccttccaagtagctgggtcctataccctcctgagccttgttaatttcttcccagcatgatcactgttttacaatattttatttatgtaggtgcttacttcttgctatgcaaagaaactcagaagcaaaaatagaatctgtctggttcataattgtgctaaaaactagagatacaagtatgaactagagagatgtcgttcttgcttttgagtttctttgcgtagtaggaattaggcacatacataaataaaatattgtaaaacagtgattcatgctgggaaggaaactaacaagccccaggagggtacaggacttctggggagatgattcttccgtgggaagctctaggggaaaaggactctaggaagaaagaacagcaggtgcaaaggccctaagtgggaaaaggggctgtgttttaagggtcagaagggccactgtggctgtgtgtagtgaatgagggacagaggctgggcaatggtggaagtaggggaggtcaggggaatccagatcacacagggaggcccttgtgggtcacaagaggtatttgcagtttttcagtgtgaatggaaaagtaggtgggcctgggaaggcgacacttgatctgatttacacttttcttttttcttttcttttctttttgagaccaagtctcactttattgcccaggctaaggtgcagtggcatgatctcagctcactgcaagcactgcctcctgggttcaagtgattctcatgcctcagcctcccaagtagctgggattacagatgcccgccaccacaccaggctatttttgtgttttcagtagagacagggcttcgccatgtggcccagactggtcttgaaatcctgggcccaagcgatccacccacctcagccttccaaagtgctgggattacgggtgtgagccaccatgcccagcctgatttaccctttaagaaacatcatatttcatggaatctaagatgccatccattgtaagaccccaatatgaggccaaaatgcaaactgtgacacgctattggttataagacacatcctgatctcaatgatattcaaatggtgacatatatgtcttggcatcgatgaaatatggtcagattactctccctgtggggtggaggaagggtctccagggttcagagattgcaaaacccccatctagtttctgcactggtaccggccgacccgtgatgtgagttgatttagcctgaatccacttggcagcagtgtaaacctgctgcatttatttatttttttctttttttttcgagacagagtttcgctcttgttgccaaggctggagtgcagtctcagttcactgcaactccgcctcccgagttcaagcaattctcctgcctcagcctctcaagtagctgggagtataggcatgtgccatcacacccggctaattttgtatttttagtagagacggggtttctccatgttggtcaggctggtctcaaactcccgaccttaggtgatccacccgcctcggcctccaaagtgttaggattacaggcgtgagccactgcacctgctgcttttatatgcagccctgcaagggagttctgaggctgaatcatggcaaagtcatggccctgaaatcatacccgcagcagcacctgacctgttaaaaggctgcttggtgtcgagtaaacagctgaagttggcatcagtgacactcatcatgctattttcactgctactaatgctggttgtgaatatgctgcagaaactggagctggtccagtgactggctttttctcttcctgcccccagtgctggtcacaccctctatgttaactcatgcgaccctcaccaatgttcctgtgatgtagtcagaaccatagctaacatttagttcattctaggcaccaaggcatattctaaatgttatatcagcattgattcatttactcctccccacaatgactctatcatgcccattttacagatgggcaaactgagtctcagaagagttgagtagcttgcccaaggtcacataggcagtaagaggcatagctgggatttgaacttgggaagttgttctgacagtttccacacagtaaggcaagaaatgacttccttttagtcctgctgttttcctgggctcactgtttgaccacagagaagtggtctcaactctctgggtcttggtttgcctgtctttaaaatggggcagtaatcccagtaggtggtgactcccacggggctgacctccaggctgcaggggacactgagatcctagaagcaatcaccacagccctgaacaagagaactagtgggacctggggacagaaactttgagcaagtcacttattcattcctagcctctattttcatatctagaaaatgggaaccatcccaatggcctatgtaagtacttggcacaatgccaggctctgttgtgcaataaatattggttccttcccccagggatagtgggaccaggctttttctggaatctagggatggtggcttctggaaggctgaccatgcacaggcctccaatccctccccctggcctctgtttccgacagcttgtacaataactgcatctgcgacgtgggagccgagagcttggctcgtgtgcttccggacatggtgtccctccgggtgatggagtgagtgtgggagtctgggcggtgggtggctcagcccggggtgggagacactgaagtctctccctggtgtcctggaagagctggatgtgggggtggccttggtctggagctggggagtcccaagggccaggccccaaggtgagtttctcttgccagcgtccagtacaacaagttcacggctgccggggcccagcagctcgctgccagccttcggaggtgtcctcatgtggagacgctggcgtaagtccaggcaaccctggtgggtggagaacaactcactccccaggcgtgtggcccagtgtgaccccggagctcaaatcatgctcttcccttcaccaatctgcaaccctgggtgagcagacacttccccctctggcttcagcttcttcatctgtaaagtggggacagtaataatatccacccaagaggttttgtgaggcttaaactaatcaagccctacaaagctcttataacaacagtagctggcacacaaaaatgccaataaatgctatattaggctgaaccatatgaaattgctgacatccacccatttttgacctgtaaaattggcaatttcatatggttcaggtttatcttttattaagtcaccatgatgtccaatactggttactttatattctttcaaagcacttttatctccacaatcactcacctcttctaagacgcacagggtgggtcttacaagacccattttacagatgaggaaaataaagcacagagcagttaactaacctttctggggtcacacagcaagtcagctgcagaaccataaaggaatctcgggcctcctaggcttctccttttccccatgacccacaccggtcggtatcttgccaggggaaaagtccccaacgttctaggctgggtggaaggagggatttgggggcagctgtcactggggccccaggccgccctctctcctctaacctagctctgagtcccatccccccttgcaggatgtggacgcccaccatcccattcagtgtccaggaacacctgcaacaacaggattcacggatcagcctgagatgatcccagctgtgctctggacagggtaaccagggtgggcttgggaggggagagccgcagtgggttgggggcagtgtccttgtgaaggtggcattcaaaaaatgtgggcgggacacaggtggggctaggccaccacccttggacgcatgcgtcatcagagacatcccctcatctccaccctgggctcggtggagctgtcctccaggctttgcgagcttggtccctgtggtcaggcttagagatcaggggacaggaaagttggccatccacatcccacagcctcagtgcttggaagagcttcctttggggactccaagccttcccagctgctgtttcggcttggtggctgccctgatgctccgggtttgtctcagatgaacttgcttgacaagtctcctgctcctcactatgaagatcactgtcccccagccctgtgctccccgcactgtgctgcacgtccacctccattccactgcccctcccatccccccatcttgatagcacccttcccaggtgtcaagctgcccctcctagagtgtcctgcctaaaccccctctcctggctcctcccgctacagcatgttctctgaggacactaaccacgctggaccttgaactgggtacttgtggacacagctcttctccaggctgtatcccatgagcctcagcatcctggcacccggcccctgctggttcagggttggcccctgcccggctgcggaatgaaccacatcttgctctgctgacagacacaggcccggctccaggctcctttagcgcccagttgggtggatgcctggtggcagctgcggtccacccaggagccccgaggccttctctgaaggacattgcggacagccacggccaggccagagggagtgacagaggcagccccattctgcctgcccaggcccctgccaccctggggagaaagtacttctttttttttatttttagacagagtctcactgttgcccaggctggcgtgcagtggtgcgatctgggttcactgcaacctccgcctcttgggttcaagcgattcttctgcttcagcctcccgagtagctgggactacaggcacccaccatcatgtctggctaatttttcatttttagtagagacagggttttgccatgttggccaggctggtctcaaactcttgacctcaggtgatccacccacctcagcctcccaaagtgctgggattacaagcgtgagccactgcaccgggccacagagaaagtacttctccaccctgctctccgaccagacaccttgacagggcacaccgggcactcagaagacactgatgggcaacccccagcctgctaattccccagattgcaacaggctgggcttcagtggcagctgcttttgtctatgggactcaatgcactgacattgttggccaaagccaaagctaggcctggccagatgcaccagcccttagcagggaaacagctaacgggacactaatggggcggtgagaggggaacagactggaagcacagcttcatttcctgtgtcttttttcactacattataaatgtctctttaatgtcacaggcaggtccagggtttgagttcataccctgttaccattttggggtacccactgctctggttatctaatatgtaacaagccaccccaaatcatagtggcttaaaacaacactcacatttattctgctcacatatctgtcatttgagcagggctcagcggggacagctccttctgtcctactctgtgtcaggtggggcagcttgagggttgggctggtgtcacctgaagactcattcttctgtacgtctgacaggcaatgctggctgttggctgggggcctcagtgccactacggaatagttggctaggacccctccatgtgggctagttgggcttcctcatagtatggtggctgggttggagggtgtcccaaaaagaaaggaggggatagagagagaccacttttcataacctagccttagaagtcacacagtattacttctgctacatatatatgttttaagaggcagggtctcactctgtcgcccagtctggaatgcagtggtatgatcacggctcactgcagcctcaacctcctgggctaagtgatcctcccacctcagcctcccgaatagctgggactacaggtgtgagtcaccaagcccagttaatctttagttttatttttgtagagccagggtctcactatgttgcccaggcaggtcttgaactcctggcctcaagtgattctcctgcctcagcctcccaaagtgctgggattacaggtgtgaaccaccacacccagcccacttctgccatattctgttggccagtgtgacaaggattgctactgtcctacccaccctcctttcaccacatgtgcacatgcacgtgtgtgcacgtacacacacatacacacacacgcgtgcacacaccagagcccaccttggctcaagtcctcttttctgagaggacttttctttgtggcttcctaaaattcagtggaaaattaattgtttggggatgagaaaggttgaagcaccaaaagcttaccaaggggaatgtttgcctctgcctctgacacacagctctgtcctgggagtgagctggtttttagcggagacggagtcccaccttggctgcagggagtccgaaagggacttggaagctccgctttctacccagcgagctgccggcacgactgttgcttttcactcgggcatagtctgctcagaagccccaattcaagacatcttagcttactcctggtggcagtgggagctgcctgttcagctccagctcaccagccccagtgcccacaggatcagtctgattcccaagctctgctcctctccccagcaagtgagagctgggtgtcaagagggtctgaggaatccagacccggctgcgtggttgatgatctttgcagacaggcaagcacctcctgcctcgaactggctgcaaagggtatcaggtgctgccatccaggttcagcttgtaaatagctcaggtgtcaccctgcaagggatccctgcacttgcagactctacagaggccatgggcctcctgtgtgtgcggctacaggagtgagcactgaggtgtgctctgatcatccactgtgccatgtgccaggtttttggtctgacccactgcttttggtctgtgtgatgatgaaatgaggtcagagcctgcagttattaacactaacgatttgttaatgatagctactgtttattattttatttaatttttttgagacagagttttcactcttattgcccacgctggagtgcagcggcatgatctcggctcactgcaacctctgcctcctgggttcaagcaattctcccacctcagcctcccaagtagctgggattacaggcatgcaccaccacgcctggctaatttttgtatttttagtagagatggagtttcaccatgttggccaggctggtaatctgcctgccttggcctcccaaagtgctgggattacaggggtgagccaccgcacccggccactactgtttatttaatgagcagatacatgcaaagcccttatcacagtgcaagggaaattcaaagcgctcagaaagtattagctcaataagtgatgactgtgtgccagacactgtgctaaactcctactcaagagggataagagtctaggggcaggtggcagagactctagaacgagattgcctgggctcaacgcccacctcaccacttacttatgcaagctagttctctgtgcctcagtctcctcatttgtaaaatgggcataaccacagcaccttctttataggattatgtgaaggtgtggtgagctaatacgttaagaattggagctcaataacatgttggctgtcattattacatatatctgtgtttcattcttgcctctggctgggaatgttcttcccagctctccatatggctgatttctcatccttcgggacttgccccattctccaaccccatcactagttttatctttttcacttatttatgcagtctgctcttgtcctaggacatgagctccaggagggcgggaaacatctcgctttgtacactgctgtgccctctgtacccagcaaggcgcctgtgtataataggtgctcaataacataaaatgaacaaataatcctcacctaacggtttcattcattctacaaatacatactgacagcacagtcatgaataagatgttcctgccctggtgagtcttatattttagcaaattaaaaaaactctttggacagggctgccaggtgaggttggccagtctgtacactgcacaaaggcacctgggacaagggggaacatgggggctgcaaaccagtctgggttctgcttgccaaactgggagtcctggtgtggagccttttaacccagaggggcatcttttcgtagttaacgcacagtcatcgtaagatgtggataaattactgtctccgtgtcacagatctaagtgatacttatagtcacactcctataaaggaatggacttctgacttctttggaggacctctctgcagggacaggcacagtgtgccggaagtgcccctgaaccccatttgtcaggtggtaaagcgctgctcggaggaatcagggcatgatagtgcaattccatgtccagtggattgtaagtccacgcaccttccaaatggtcactcttcctcgcaggcctctctctgcatacaaatgtctccctcctgacgctcacctttttccctggggctctcaaatgtcttcttttcagatttcgtagcttttctttctttagcatcacttgagggcaagtggtgctccaactgtctccccccagagttctgccgcctgtactctcccacacctcagtctcctcgcctgtagaaaggggtcaatcgtttgaaccctgcttcacttggtgtgtatgtgaaggtgctttgaaatcaagtgctctgcaaactggagagaattactgcttgtattccgtgaaactacaagctcccaattccactcatttaatccctctcttgctctgttgcccaggctggaatgcagtggcatgatctcaactcactgcaacctctgcctccctggtttcaagcaattctcctgcctcagcctcccgagtagctgggactataagtgtgcgccactatgcctggctaatttttttgtatttttagtagagatggggtttcaccgtggtggccaggctggtctcgaactcctaacctcaagtgatctgcccgcctcggccttccaaagtgctgggattacaggcatgagccaccatgccaagcccttcccccctatctttaatgaaggtctaccatgtgcctgacacaggggatacccacccccacttctatgggattcaggcctggtttccagcttggccttcaggcttttcccaccacaccccaaatgctgtccctggcttgtggagtggggcagggggccagcctgggactttcacgccagcccgactggggcagactctctcaaccccactggatcttctgctgtttgtcagccacaaggttctgcctagaactcctttcccgaatctcaaagttaaaaaaaaaggcagggccccaggggttggagttgcatacatttttttttaatccaaagaagtaagcctcctaagtattgcttagacaggtttatcagaattaagtaggcacaacactcatactttcagaaaagcatttccagccaggggagtaacgtggcactcaccagcatgatgtctgttttgccaacttgctgaagaacgagtaacctgaaatgaaggagcgagaatcccaccctcagccccccaacagcttcctcagcttctttttcttctgagtcacccctgaaacagtcgctgcatctaagaccagcctcgggctaaacccagctggcctgaaggctcaactcacatcaaacggagctgggagtcgcttttgcgtgtgtccgcagtttgaagtgtcctctccgaaggtgaagtgggggaagcaggtgcgctccgggatgaagtgcagggaggcaaactctggctgggttcctgtaaacatccatcgcagctgcaaataatcagaagccaaggccaggccatcgatttgacactgcaggcagatgaggtcttgggatgcctcttgcgttcccccttctgtgggagcaggtgccttcccaacctcagcactcagtcccaatctctcttccactctcctgggttcaaacaggaacctctctgttggcacgaagcttttgaggggagcaggtctaacaagaaggaaaaaggggggttattagcacggaagccccaccctgccaccaggttggctggggacagggaccaatccaccaggctcgggaggcttggggtggggcagggaagtcttcctccatccctcaaatttagggaaccactgggagccccagactcaggctgaaaatgtctttctgcaaatataaaactctttttaatgaatttgcctaatttctcagagaccctgggctggagaaccagtgcaatgtcacacgggagaggaaggactgtcctgtttattgggagggaggagggggatgctggtgcagcctgctcaggagtcacccagggtctgagggctgacttgcagctctgggccagctgagccagcgctgggtagtgggcagggcttggcaacacctcccaccttgcccggaaaaatgctttgcaacctacaggaaggcactagccacagccaagttactcagcagccccacttggctctttctcccaggatgcagcatcatctccatggcctggccccctggcacgtccccgtttcccactgccttctctgtgtgcctagccgggtgccagtgtctctgtagcacctcgtgttcccatgcccaacccctctgcagccccctcaagccctgctctgattccaagcctcatctcccagctcactatcctttccgcaaatttcactgaacatctcgcagaacttgtatgttaaacatgtgacatgtattgttgtttgacagggtgctattgacatttggggtaggacaattcttggaggtggggtggctgttctgggcactgagcatttagcagcatctctggctccaggccactaaatgccagtagcacccctggccactggaacaactaaaaatgccctcctaccctatttccaaggtcgacctaagggggcggaactgtttccattgagacccatgcatcgtataggataagaaactgaggttcttatcatttaataggataagaaattgaggttcagagaagccaagtaacctgcctaaagatgcacagctatgagaggcaaagctggcactggcttggtaataacgatggaaacggtctgaatgagagcaggtaccatttcctgagctcttagcagacgctgaggaccctgctaagtgccatgagaccttagcagaggctgtgggtgccccgccccattccctccactcactcttccttgcaggtcgacctgcccttctttgctgaggcctttctctgcctccagagcctgcttggtcctcaggctgtaagtgcaggcagagctaatgtctctccatagctgccctccaccagcctgctcctgagacacctgctggccagcagcctgaagcagaatcctttactcagattcagccgcacagatgctcactgcagagatctccaaggcctgtggtcatccttgagcccatctcagatttgtgtggatagggtgttagagaacatggaatcagctggatagagtggttcatgcttgtaatcccagcactttgggaggctggggtgggaggatcacttgaggccaggagtttgagaccagcctgggcaacacagtgagactctgtctctataaaaaatttaaaaattagccaggcatagtgtagtctcagctacttggaaggctgaggcaggaggattgcgtgagcccagcagttcaaggctgcagtgaactatgactgtgcccctgcacccagcctgggtgacagagaccctgtctcaaaaaaaagagaagatggaatcactcggtgaggacctcactcctctcccagtcctgtgaccacaaaccgcatccccgacagtcccagccaggcgctagtctggctgtagctgccctcttgtgtgcagatctccagtctgaatgggctacacgtggaatttactaacactccggttttcattgtgtttatctgtagggttaccttctatttatagcaagtgatgccaagtttccatttctggtagtaatatagtttttcttttccaagtcgctcacacctgtaatcccaacactttgggaggctaaggtgggtggatcagttgagatcaggagtttgagaccagcctggccaacatggcgaaatgaggtcaagactagcctggccaacatggcgaaaccgcgtctctactaaaaacaaacaaacaaaaatacaaaattcgctgggcatggtggcaggtgcctgaggtcccagctactcgggaggctgaggcagaagaatcgcttgagctagggaggcagaggttgcagtgagccgagatcacgccactgcactatagcctaggtgacagagtgagactctgtctcaaaaaaacacaaaagtttctcttttcaaaacattttactttaaaaggagccaatttaaagaaaactgttaatagttcaggtaacaggcagatacaggaaaagctgctgacagtgttgtatgaggtttgaggattttgatccaagctggtcccactcagtccatagcagagaatgaaagggcccagagagggtggtgacctctgcctgaagtcacacagtgagtcgaggacagggaggtgaccccaggtttctatgtgtagggcgggaggatgttctgggacacagttcaattctcatttgtcacacactttggctattagagatcaaccccttcgctcctgtgtcttgcaatggcagccttggcaaacgctaaatgaaaatcgtgacaacacttgtgttatgaagcatttactttgtgttcaccttgtactactcgaactcatgtcttaactcannnnnnnnnnnnnnnnnnnnnnnnnnnnnnnnnnnnnnnnnnnnnnnnnnnnnnnnnnnnnnnnnnnnnnnnnnnnnnnnnnnnnnnnnnnnnnnnnnnnnnnnnnnnnnnnnnnnnnnnnnnnnnnnnnnnnnnnnnnnnnnnnnnnnnnnnnnnnnnnnnnnnnnnnnnnnnnnnnnnnnnnnnnnnnnnnnnnnnnnnnnnnnnnnnnnnnnnnnnnnnnnnnnnnnnnnnnnnnnnnnnnnnnnnnnnnnnnnnnnnnnnnnnnnnnnnnnnnnnnnnnnnnnnnnnnnnnnnnnnnnnnnnnnnnnnnnnnnnnnnnnnnnnnnnnnnnnnnnnnnnnnnnnnnnnnnnnnnnnnnnnnnnnnnnnnnnnnnnnnnnnnnnnnnnnnnnnnnnnnnnnnnnnnnnnnnnnnnnnnnnnnnnnnnnnnnnnnnnnnnnnnnnnnnnnnnnnnnnnnnnnnnnnnnnnnnnnnnnnnnnnnnnnnnnnnnnnnnnnnnnnnnnnnnnnnnnnnnnnnnnnnnnnnnnnnnnnnnnnnnnnnnnnnnnnnnnnnnnnnnnnnnnnnnnnnnnnnnnnnnnnnnnnnnnnnnnnnnnnnnnnnnnnnnnnnnnnnnnnnnnnnnnnnnnnnnnnnnnnnnnnnnnnnnnnnnnnnnnnnnnnnnnnnnnnnnnnnnnnnnnnnnnnnnnnnnnnnnnnnnnnnnnnnnnnnnnnnnnnnnnnnnnnnnnnnnnnnnnnnnnnnnnnnnnnnnnnnnnnnnnnnnnnnnnnnnnnnnnnnnnnnnnnnnnnnnnnnnnnnnnnnnnnnnnnnnnnnnnnnnnnnnnnnnnnnnnnnnnnnnnnnnnnnnnnnnnnnnnnnnnnnnnnnnnnnnnnnnnnnnnnnnnnnnnnnnnnnnnnnnnnnnnnnnnnnnnnnnnnnnnnnnnnnnnnnnnnnnnnnnnnnnnnnnnnnnnnnnnnnnnnnnnnnnnnnnnnnnnnnnnnnnnnnnnnnnnnnnnnnnnnnnnnnnnnnnnnnnnnnnnnnnnnnnnnnnnnnnnnnnnnnnnnnnnnnnnnnnnnnnnnnnnnnnnnnnnnnnnnnnnnnnnnnnnnnnnnnnnnnnnnnnnnnnnnnnnnnnnnnnnnnnnnnnnnnnnnnnnnnnnnnnnnnnnnnnnnnnnnnnnnnnnnnnnnnnnnnnnnnnnnnnnnnnnnnnnnnnnnnnnnnnnnnnnnnnnnnnnnnnnnnnnnnnnnnnnnnnnnnnnnnnnnnnnnnnnnnnnnnnnnnnnnnnnnnnnnnnnnnnnnnnnnnnnnnnnnnnnnnnnnnnnnnnnnnnnnnnnnnnnnnnnnnnnnnnnnnnnnnnnnnnnnnnnnnnnnnnnnnnnnnnnnnnnnnnnnnnnnnnnnnnnnnnnnnnnnnnnnnnnnnnnnnnnnnnnnnnnnnnnnnnnnnnnnnnnnnnnnnnnnnnnnnnnnnnnnnnnnnnnnnnnnnnnnnnnnnnnnnnnnnnnnnnnnnnnnnnnnnnnnnnnnnnnnnnnnnnnnnnnnnnnnnnnnnnnnnnnnnnnnnnnnnnnnnnnnnnnnnnnnnnnnnnnnnnnnnnnnnnnnnnnnnnnnnnnnnnnnnnnnnnnnnnnnnnnnnnnnnnnnnnnnnnnnnnnnnnnnnnnnnnnnnnnnnnnnnnnnnnnnnnnnnnnnnnnnnnnnnnnnnnnnnnnnnnnnnnnnnnnnnnnnnnnnnnnnnnnnnnnnnnnnnnnnnnnnnnnnnnnnnnnnnnnnnnnnnnnnnnnnnnnnnnnnnnnnnnnnnnnnnnnnnnnnnnnnnnnnnnnnnnnnnnnnnnnnnnnnnnnnnnnnnnnnnnnnnnnnnnnnnnnnnnnnnnnnnnnnnnnnnnnnnnnnnnnnnnnnnnnnnnnnnnnnnnnnnnnnnnnnnnnnnnnnnnnnnnnnnnnnnnnnnnnnnnnnnnnnnnnnnnnnnnnnnnnnnnnnnnnnnnnnnnnnnnnnnnnnnnnnnnnnnnnnnnnnnnnnnnnnnnnnnnnnnnnnnnnnnnnnnnnnnnnnnnnnnnnnnnnnnnnnnnnnnnnnnnnnnnnnnnnnnnaaccaggaagtctagcttgatacccttggcctgtataactgagccttgtgccagttaaaagggcaaagcagtaggtgctcagggggtgtcggggccctgaaagctgatctgatccgctgctgcgtattcactaccgccctgggacgcctccagcagaccacctcactgggggaaacatcaggacagcgtggccaggagcccaatgctgccacctcatagatgggtatctgagatgagtcatcgaacttctgcaagcctcagtttcctccctggtctaatggaaccctccttggcggcttcacagggtgatgcttggggcaggtgatggagatgtgggagaggcagttatttttaaccacccagccaagccccttgccaggagggactcccagaaatgaagccttacccttgagggagttccccgccactccaagcttggggcctgggatggcagctgtgagggcaccagcaccatctggggactcgctgggtaccaattatcaccgcccttgggctacttcaaaggctgcccacacagacacaccctccttggtaaccagtcctcaggaggaagggcacccaaggaaagggggaaggcttcctgggctagagccccttcagggtctgacacgccattgacactgaccacgtcattcattaagcaagcaccaactatacatcattcactatcccaatctaatttgcacaagcccttaggcaggtgctactattatccctgttttacagagaaggaaaccgaggcttaggagatgaagtctgaggtgttggtggagctgggatttaaaccaaaatatgtccaactgcaaagcatgtaagtaacaattttagagggtatacggaggtgaccctaagtaacaaggaatcacatatagtgagcaagcaatttgcttttcagtttttggtcaatccttatgattatttagaggagaaagttcagtttggtgctggtatatcttatgtttatcacccgacagttgttaatctctttttaacaaagaatacaggccaaggccctgtgactttagctggctttggtatttggccaaaagttaatgactttggcagttagtgtttttatccatgccaagcgatgatgattttctctttagtgacagacattttttaaaaaataaattcacataaaaaagtagttttacagatgaagcactaaaactagtgcatttcatcttaaactgcaaattataaagggaataatagtaacttgacagtggagagacctggcagacaccaccttcaccaactgatcaaagttaacatcgccagaaaggggacagatggcatgtgcctctcgataagatgcactgaagacacacactcacttctgcaatattcctgccaagaatgcctcatctgaatctaatctcgagtataaccatcagacaaacccaaattgagagacagtttacaaaacaccagccttgtactctgcttaatatgtcaatgtcacaagagagaaagacagactgaagagctgatccagactgaagaaggctcgagattaatgcaaaagctgatctgggattgcatcttggacctcaactctcccctttttattgttaagggacactactgggacaatttttttttttttttcgttttgagacagggtctcgctcagtcacccaggctggagtgcagtggtggaataataactcactgcagccttgaactcccggactcaagcaatcctcctgcctgagccttccgagtaactgggactatgggcgtgtaccacaacacctcgctattttttttttcctactttttgtagagacggggtctcactatgttgcccaggctggtttcaaactcaagtgatccttccacctcagcctctataaaatttgaataaagttgtagatgagattggtcataggattgtatagtgtatcaatattagatttgctgattttgacaaccctactgtggttatgcaaatttgtccttgttctaaggaaataaatactgaattatttaggagtaaaggtgcataatgaacccattttcaaatgcttatgaaaattacacatatacacatgtgtgcatatacacaggcatgcatatacaaacagagggaagagcatgcacgtgtacatgagcaaagtgctaactggtgcaactggtgagtttgggcgggcattgtttgtgctcttgcaacttttctgtaagtgtgaaattacttcataacagaggtttttgtttgtttgtttgtttttaattcaggaaaaagttggaagagtgcgtatgaaataggcctggcagaaactatgagctggtgttccaaggtcggggatggggagccctcactggaggcacccctcaaaccctcagtgctgtggccagggaaccgggctggcagtcttagttggctttgttccctcggcctccacttccccattctgtgcctccatttatttgtgagacagggataaagaggtctgccacttttattgtgatcttaggtttcccaaaagcagagtatgctttcagaagttctgggaggaaagctagcagataaaccagaaatatgaatatccaaattgagagaagccctcactttcttagttcagcaaaacagacacatgagctgtaagtggggcagaccctgcctgtttcttggctgaaatctccagtttgtataattcagggctaagagagcaggactcttgacatctcactgtcttgagacacatactggggttttctcctgtctgaagacgcagctggcaccaatgtaccctatggccaaggaccttctgggtgagcctcatgtcaggagcagagctggagaggtggccaggcctgggggtatacttgcctccctgtgtcaccattgtctgtctcttgcttagatgacagccacagcttcctggcctggtttcctgcatccgccctgacccctggctgtgggatctcccataactcaaatctgactgtgtgccctgtggaaggtttgggtttctgacctgggcagctctatgtccggcacagnnnnnnnnnnnnnnnnnnnnnnnnnnnnnnnnnnnnnnnnnnnnnnnnnnnnnnnnnnnnnnnnnnnnnnnnnnnnnnnnnnnnnnnnnnnnnnnnnnnnnnnnnnnnnnnnnnnnnnnnnnnnnnnnnnnnnnnnnnnnnnnnnnnnnnnnnnnnnnnnnnnnnnnnnnnnnnnnnnnnnnnnnnnnnnnnnnnnnnnnnnnnnnnnnnnnnnnnnnnnnnnnnnnnnnnnnnnnnnnnnnnnnnnnnnnnnnnnnnnnnnnnnnnnnnnnnnnnnnnnnnnnnnnnnnnnnnnnnnnnnnnnnnnnnnnnnnnnnnnnnnnnnnnnnnnnnnnnnnnnnnnnnnnnnnnnnnnnnnnnnnnnnnnnnnnnnnnnnnnnnnnnnnnnnnnnnnnnnnnnnnnnnnnnnnnnnnnnnnnnnnnnnnnnnnnnnnnnnnnnnnnnnnnnnnnnnnnnnnnnnnnnnnnnnnnnnnnnnnnnnnnnnnnnnnnnnnnnnnnnnnnnnnnnnnnnnnnnnnnnnnnnnnnnnnnnnnnnnnnnnnnnnnnnnnnnnnnnnnnnnnnnnnnnnnnnnnnnnnnnnnnnnnnnnnnnnnnnnnnnnnnnnnnnnnnnnnnnnnnnnnnnnnnnnnnnnnnnnnnnnnnnnnnnnnnnnnnnnnnnnnnnnnnnnnnnnnnnnnnnnnnnnnnnnnnnnnnnnnnnnnnnnnnnnnnnnnnnnnnnnnnnnnnnnnnnnnnnnnnnnnnnnnnnnnnnnnnnnnnnnnnnnnnnnnnnnnnnnnnnnnnnnnnnnnnnnnnnnnnnnnnnnnnnnnnnnnnnnnnnnnnnnnnnnnnnnnnnnnnnnnnnnnnnnnnnnnnnnnnnnnnnnnnnnnnnnnnnnnnnnnnnnnnnnnnnnnnnnnnnnnnnnnnnnnnnnnnnnnnnnnnnnnnnnnnnnnnnnnnnnnnnnnnnnnnnnnnnnnnnnnnnnnnnnnnnnnnnnnnnnnnnnnnnnnnnnnnnnnnnnnnnnnnnnnnnnnnnnnnnnnnnnnnnnnnnnnnnnnnnnnnnnnnnnnnnnnnnnnnnnnnnnnnnnnnnnnnnnnnnnnnnnnnnnnnnnnnnnnnnnnnnnnnnnnnnnnnnnnnnnnnnnnnnnnnnnnnnnnnnnnnnnnnnnnnnnnnnnnnnnnnnnnnnnnnnnnnnnnnnnnnnnnnnnnnnnnnnnnnnnnnnnnnnnnnnnnnnnnnnnnnnnnnnnnnnnnnnnnnnnnnnnnnnnnnnnnnnnnnnnnnnnnnnnnnnnnnnnnnnnnnnnnnnnnnnnnnnnnnnnnnnnnnnnnnnnnnnnnnnnnnnnnnnnnnnnnnnnnnnnnnnnnnnnnnnnnnnnnnnnnnnnnnnnnnnnnnnnnnnnnnnnnnnnnnnnnnnnnnnnnnnnnnnnnnnnnnnnnnnnnnnnnnnnnnnnnnnnnnnnnnnnnnnnnnnnnnnnnnnnnnnnnnnnnnnnnnnnnnnnnnnnnnnnnnnnnnnnnnnnnnnnnnnnnnnnnnnnnnnnnnnnnnnnnnnnnnnnnnnnnnnnnnnnnnnnnnnnnnnnnnnnnnnnnnnnnnnnnnnnnnnnnnnnnnnnnnnnnnnnnnnnnnnnnnnnnnnnnnnnnnnnnnnnnnnnnnnnnnnnnnnnnnnnnnnnnnnnnnnnnnnnnnnnnnnnnnnnnnnnnnnnnnnnnnnnnnnnnnnnnnnnnnnnnnnnnnnnnnnnnnnnnnnnnnnnnnnnnnnnnnnnnnnnnnnnnnnnnnnnnnnnnnnnnnnnnnnnnnnnnnnnnnnnnnnnnnnnnnnnnnnnnnnnnnnnnnnnnnnnnnnnnnnnnnnnnnnnnnnnnnnnnnnnnnnnnnnnnnnnnnnnnnnnnnnnnnnnnnnnnnnnnnnnnnnnnnnnnnnnnnnnnnnnnnnnnnnnnnnnnnnnnnnnnnnnnnnnnnnnnnnnnnnnnnnnnnnnnnnnnnnnnnnnnnnnnnnnnnnnnnnnnnnnnnnnnnnnnnnnnnnnnnnnnnnnnnnnnnnnnnnnnnnnnnnnnnnnnnnnnnnnnnnnnnnnnnnnnnnnnnnnnnnnnnnnnnnnnnnnnnnnnnnnnnnnnnnnnnnnnnnnnnnnnnnnnnnnnnnnnnnnnnnnnnnnnnnnnnnnnnnnnnnnnnnnnnnnnnnnnnnnnnnnnnnnnnnnnnnnnnnnnnnnnnnnnnnnnnnnnnnnnnnnnnnnnnnnnnnnnnnnnnnnnnnnnnnnnnnnnnnnnnnnnnnnnnnnnnnnnnnnnnnnnnnnnnnnnnnnnnnnnnnnnnnnnnnnnnnnnnnnnnnnnnnnnnnnnnnnnnnnnnnnnnnnnnnnnnnnnnnnnnnnnnnnnnnnnnnnnnnnnnnnnnnnnnnnnnnnnnnnnnnnnnnnnnnnnnnnnnnnnnnnnnnnnnnnnnnnnnnnnnnnnnnnnnnnnnnnnnnnnnnnnnnnnnnnnnnnnnnnnnnnnnnnnnnnnnnnnnnnnnnnnnnnnnnnnnnnnnnnnnnnnnnnnnnnnnnnnnnnnnnnnnnnnnnnnnnnnnnnnnnnnnnnnnnnnnnnnnnnnnnnnnnnnnnnnnnnnnnnnnnnnnnnnnnnnnnnnnnnnnnnnnnnnnnnnnnnnnnnnnnnnnnnnnnnnnnnnnnnnnnnnnnnnnnnnnnnnnnnnnnnnnnnnnnnnnnnnnnnnnnnnnnnnnnnnnnnnnnnnnnnnnnnnnnnnnnnnnnnnnnnnnnnnnnnnnnnnnnnnnnnnnnnnnnnnnnnnnnnnnnnnnnnnnnnnnnnnnnnnnnnnnnnnnnnnnnnnnnnnnnnnnnnnnnnnnnnnnnnnnnnnnnnnnnnnnnnnnnnnnnnnnnnnnnnnnnnnnnnnnnnnnnnnnnnnnnnnnnnnnnnnnnnnnnnnnnnnnnnnnnnnnnnnnnnnnnnnnnnnnnnnnnnnnnnnnnnnnnnnnnnnnnnnnnnnnnnnnnnnnnnnnnnnnnnnnnnnnnnnnnnnnnnnnnnnnnnnnnnnnnnnnnnnnnnnnnnnnnnnnnnnnnnnnnnnnnnnnnnnnnnnnnnnnnnnnnnnnnnnnnnnnnnnnnnnnnnnnnnnnnnnnnnnnnnnnnnnnnnnnnnnnnnnnnnnnnnnnnnnnnnnnnnnnnnnnnnnnnnnnnnnnnnnnnnnnnnnnnnnnnnnnnnnnnnnnnnnnnnnnnnnnnnnnnnnnnnnnnnnnnnnnnnnnnnnnnnnnnnnnnnnnnnnnnnnnnnnnnnnnnnnnnnnnnnnnnnnnnnnnnnnnnnnnnnnnnnnnnnnnnnnnnnnnnnnnnnnnnnnnnnnnnnnnnnnnnnnnnnnnnnnnnnnnnnnnnnnnnnnnnnnnnnnnnnnnnnnnnnnnnnnnnnnnnnnnnnnnnnnnnnnnnnnnnnnnnnnnnnnnnnnnnnnnnnnnnnnnnnnnnnnnnnnnnnnnnnnnnnnnnnnnnnnnnnnnnnnnnnnnnnnnnnnnnnnnnnnnnnnnnnnnnnnnnnnnnnnnnnnnnnnnnnnnnnnnnnnnnnnnnnnnnnnnnnnnnnnnnnnnnnnnnnnnnnnnnnnnnnnnnnnnnnnnnnnnnnnnnnnnnnnnnnnnnnnnnnnnnnnnnnnnnnnnnnnnnnnnnnnnnnnnnnnnnnnnnnnnnnnnnnnnnnnnnnnnnnnnnnnnnnnnnnnnnnnnnnnnnnnnnnnnnnnnnnnnnnnnnnnnnnnnnnnnnnnnnnnnnnnnnnnnnnnnnnnnnnnnnnnnnnnnnnnnnnnnnnnnnnnnnnnnnnnnnnnnnnnnnnnnnnnnnnnnnnnnnnnnnnnnnnnnnnnnnnnnnnnnnnnnnnnnnnnnnnnnnnnnnnnnnnnnnnnnnnnnnnnnnnnnnnnnnnnnnnnnnnnnnnnnnnnnnnnnnnnnnnnnnnnnnnnnnnnnnnnnnnnnnnnnnnnnnnnnnnnnnnnnnnnnnnnnnnnnnnnnnnnnnnnnnnnnnnnnnnnnnnnnnnnnnnnnnnnnnnnnnnnnnnnnnnnnnnnnnnnnnnnnnnnnnnnnnnnnnnnnnnnnnnnnnnnnnnnnnnnnnnnnnnnnnnnnnnnnnnnnnnnnnnnnnnnnnnnnnnnnnnnnnnnnnnnnnnnnnnnnnnnnnnnnnnnnnnnnnnnnnnnnnnnnnnnnnnnnnnnnnnnnnnnnnnnnnnnnnnnnnnnnnnnnnnnnnnnnnnnnnnnnnnnnnnnnnnnnnnnnnnnnnnnnnnnnnnnnnnnnnnnnnnnnnnnnnnnnnnnnnnnnnnnnnnnnnnnnnnnnnnnnnnnnnnnnnnnnnnnnnnnnnnnnnnnnnnnnnnnnnnnnnnnnnnnnnnnnnnnnnnnnnnnnnnnnnnnnnnnnnnnnnnnnnnnnnnnnnnnnnnnnnnnnnnnnnnnnnnnnnnnnnnnnnnnnnnnnnnnnnnnnnnnnnnnnnnnnnnnnnnnnnnnnnnnnnnnnnnnnnnnnnnnnnnnnnnnnnnnnnnnnnnnnnnnnnnnnnnnnnnnnnnnnnnnnnnnnnnnnnnnnnnnnnnnnnnnnnnnnnnnnnnnnnnnnnnnnnnnnnnnnnnnnnnnnnnnnnnnnnnnnnnnnnnnnnnnnnnnnnnnnnnnnnnnnnnnnnnnnnnnnnnnnnnnnnnnnnnnnnnnnnnnnnnnnnnnnnnnnnnnnnnnnnnnnnnnnnnnnnnnnnnnnnnnnnnnnnnnnnnnnnnnnnnnnnnnnnnnnnnnnnnnnnnnnnnnnnnnnnnnnnnnnnnnnnnnnnnnnnnnnnnnnnnnnnnnnnnnnnnnnnnnnnnnnnnnnnnnnnnnnnnnnnnnnnnnnnnnnnnnnnnnnnnnnnnnnnnnnnnnnnnnnnnnnnnnnnnnnnnnnnnnnnnnnn

SEQ ID NO: 255 - DNA, 282 bp, Homo sapiens
atgaacaacttccaggccatcctgactcaggtgagaatgctgctctccagccatcagcccagcctggtgcaggccctcttggacaacctgctgaaggaggacctcctctccagggaataccactgcactctgctccatgagcctgatagtgaggctctggccaggaagatctctttgaccctactagagaaaggagacctggatttggccctcctggggtgggcccggagtgggctgcagcccccagcagccgagaggggccccggccacagtgaccatggt

SEQ ID NO: 256 - protein, 92 aa, Homo sapiens
MNNFQAILTQVRMLLSSHQPSLVQALLDNLLKEDLLSREYHCTLLHEPDSEARKISLTLLEKGDLDLALLGWARSGLQPPAAERGPGHSDHG

SEQ ID NO: 257 - DNA, 3366 bp, Homo sapiens
tgatgaggctgtgtgcttctgagctgggcatccgaaggcatccttggggaagctgagggcacgaggaggggctgccagactccgggagctgctgcctggctgggattcctacacaatgcgttgcctggctccacgccctgctgggtcctacctgtcagagccccaaggcagctcacagtgtgccaccatggagttggggcccctagaaggtggctacctggagcttcttaacagcgatgctgaccccctgtgcctctaccacttctatgaccagatggacctggctggagaagaagagattgagctctactcagaacccgacacagacaccatcaactgcgaccagttcagcaggctgttgtgtgacatggaaggtgatgaagagaccagggaggcttatgccaatatcgcggaactggaccagtatgtcttccaggactcccagctggagggcctgagcaaggacattttcatagagcacataggaccagatgaagtgatcggtgagagtatggagatgccagcagaagttgggcagaaaagtcagaaaagacccttcccagaggagcttccggcagacctgaagcactggaagccagtgcctttctccagttcctcgttgagctgcctgaatctccctgagggacccatccagtttgtccccaccatctccactctgccccatgggctctggcaaatctctgaggctggaacaggggtctccagtatattcatctaccatggtgaggtgccccaggccagccaagtaccccctcccagtggattcactgtccacggcctcccaacatctccagaccggccaggctccaccagccccttcgctccatcagccactgacctgcccagcatgcctgaacctgccctgacctcccgagcaaacatgacagagcacaagacgtcccccacccaatgcccggcagctggagaggtctccaacaagcttccaaaatggcctgagccggtggagcagttctaccgctcactgcaggacacgtatggtgccgagcccgcaggcccggatggcatcctagtggaggtggatctggtgcaggccaggctggagaggagcagcagcaagagcctggagcgggaactggccaccccggactgggcagaacggcagctggcccaaggaggcctggctgaggtgctgttggctgccaaggagcaccggcggccgcgtgagacacgagtgattgctgtgctgggcaaagctggtcagggcaagagctattgggctggggcagtgagccgggcctgggcttgtggccggcttccccagtacgactttgtcttctctgtcccctgccattgcttgaaccgtccgggggatgcctatggcctgcaggatctgctcttctccctgggcccacagccactcgtggcggccgatgaggttttcagccacatcttgaagagacctgaccgcgttctgctcatcctagacggcttcgaggagctggaagcgcaagatggcttcctgcacagcacgtgcggaccggcaccggcggagccctgctccctccgggggctgctggccggccttttccagaagaagctgctccgaggttgcaccctcctcctcacagcccggccccggggccgcctggtccagagcctgagcaaggccgacgccctatttgagctgtccggcttctccatggagcaggcccaggcatacgtgatgcgctactttgagagctcagggatgacagagcaccaagacagagccctgacgctcctccgggaccggccacttcttctcagtcacagccacagccctactttgtgccgggcagtgtgccagctctcagaggccctgctggagcttggggaggacgccaagctgccctccacgctcacgggactctatgtcggcctgctgggccgtgcagccctcgacagcccccccggggccctggcagagctggccaagctggcctgggagctgggccgcagacatcaaagtaccctacaggaggaccagttcccatccgcagacgtgaggacctgggcgatggccaaaggcttagtccaacacccaccgcgggccgcagagtccgagctggccttccccagcttcctcctgcaatgcttcctgggggccctgtggctggctctgagtggcgaaatcaaggacaaggagctcccgcagtacctagcattgaccccaaggaagaagaggccctatgacaactggctggagggcgtgccacgctttctggctgggctgatcttccagcctcccgcccgctgcctgggagccctactcgggccatcggcggctgcctcggtggacaggaagcagaaggtgcttgcgaggtacctgaagcggctgcagccagggacactgcgggcgcggcagctgctggagctgctgcactgcgcccacgaggccgaggaggctggaatttggcagcacgtggtacaggagctccccggccgcctctcttttctgggcacccgcctcacgcctcctgatgcacatgtactgggcaaggccttggaggcggcgggccaagacttctccctggacctccgcagcactggcatttgcccctctggattggggagcctcgtgggactcagctgtgtcacccgtttcaggtggggtgaggggcttggggaagagacatccttgtgttgggcattaactgcggtcttggtgccaagcccagtgctctgtggggtctcttttagtatgcagagcagccgggtggggcagaatggattgtctccatttttaagatgaggatgttgaggctcagagaggggcagccacttgccacacagcaagtgagaggcaatggcattctcccagtcaatatttgaaggcccgccatgtgccagtcactggggtatgtctagaatctgagactgacctgggctcaaatttgttttattctttccaccccctgagcacgccaccgttttcttatgctaagagtaaagccatggcctccccttggactctctgcctccattctctcctcttccactccattttgtattcagcaaccagaccaatcttctcagaacttgaatctgattgtatcccatccctgcttacaatccttcagggacactccaccactgtcaggatgaaggctaaattccttaatttggtttcattaagtcggtctgcaatctgcttgagcatttcagcttaatcgccagaggattgcttccatatttccccctaaacatactttacccaagctgtaagatcctacataattgtgccaataatttagcagtgagcttcctggtagccgaagcaaaaagggaaagaaaaccactgtgtgagttgtgagaaagtaggaatcaataaaggctggagtggtc

SEQ ID NO: 258 - protein, 879 aa, Homo sapiens
MRCLAPRPAGSYLSEPQGSSQCATMELGPLEGGYLELLNSDADPLCLYHFYDQMDLAGEEEIEKEPDTDTINCDQFSRLLCDMEGDEETREAYANIAELDQYVFQDSQLEGLSKDIFIEHIGPDEVIGESMEMPAEVGQKSQKRPFPEELPADLKHWKPVPFSSSSLSCLNLPEGPIQFVPTISTLPHGLWQISEAGTGVSSIFIYHGEVPQASQVPPPSGFTVHGLPTSPDRPGSTSPFAPSATDLPSMPEPALTSRANMTEHKTSPTQCPAAGEVSNKLPKWPEPVEQFYRSLQDTYGAEPAGPDGILVEVDLVQARLERSSSKSLERELATPDWAERQLAQGGLAEVLLAAKEHRRPRETRVIAVLGKAGQGKSYWAGAVSRAWACGRLPQYDFVFSVPCHCLNRPGDAYGLQDLLFSLGPQPLVAADEVFSHILKRPDRVLLILDGFEELEAQDGFLHSTCGPAPAEPCSLRGLLAGLFQKKLLRGCTLLLTARPRGRLVQSLSKADALFELSGFSMEQAQAYVMRYFESSGMTEHQDRALTLLRDRPLLLSHSHSPTLCRAVCQLSEALLELGEDAKLPSTLTGVGLLGRAALDSPPGAELAKLAWELGRRHQSTLQEDQFPSADVRTWAMAKGLVQHPPRAAESELAFPSFLLQCFLGALWLALSGEIKDKELPQYLALTPRKKRPYDNWLEGVPRFLAGLIFQPPARCLGALLGPSAAASVDRKQKVLARYLKRLQPGTLRARQLLELLHCAHEAEEAGIWQHVVQELPGRLSFLGTRLTPPDAHVLGKALEAAGQDFSLDLRSTGICPSGLGSLVGLSCVTRFRWGEGLGEETSLCWALTAVLVPSPVLCGVSFSMQSSRVGQNGLSPFLR

SEQ ID NO: 259 - DNA, 6710 bp, Homo sapiens
cttggcgggctcccaactggtgactggttagtgatgaggctagtgatgaggctgtgtgcttctgagctgggcatccgaaggcatccttggggaagctgagggcacgaggaggggctgccagactccgggagctgctgcctggctgggattcctacacaatgcgttgcctggctccacgccctgctgggtcctacctgtcagagccccaaggcagctcacagtgtgccaccatggagttggggcccctagaaggtggctacctggagcttcttaacagcgatgctgaccccctgtgcctctaccacttctatgaccagatggacctggctggagaagaagagattgagctctactcagaacccgacacagacaccatcaactgcgaccagttcagcaggctgttgtgtgacatggaaggtgatgaagagaccagggaggcttatgccaatatcgcggaactggaccagtatgtcttccaggactcccagctggagggcctgagcaaggacattttcaagcacataggaccagatgaagtgatcggtgagagtatggagatgccagcagaagttgggcagaaaagtcagaaaagacccttcccagaggagcttccggcagacctgaagcactggaagccagctgagccccccactgtggtgactggcagtctcctagtgggaccagtgagcgactgctccaccctgccctgcctgccactgcctgcgctgttcaaccaggagccagcctccggccagatgcgcctggagaaaaccgaccagattcccatgcctttctccagttcctcgttgagctgcctgaatctccctgagggacccatccagtttgtccccaccatctccactctgccccatgggctctggcaaatctctgaggctggaacaggggtctccagtatattcatctaccatggtgaggtgccccaggccagccaagtaccccctcccagtggattcactgtccacggcctcccaacatctccagaccggccaggctccaccagccccttcgctccatcagccactgacctgcccagcatgcctgaacctgccctgacctcccgagcaaacatgacagagcacaagacgtcccccacccaatgcccggcagctggagaggtctccaacaagcttccaaaatggcctgagccggtggagcagttctaccgctcactgcaggacacgtatggtgccgagcccgcaggcccggatggcatcctagtggaggtggatctggtgcaggccaggctggagaggagcagcagcaagagcctggagcgggaactggccaccccggactgggcagaacggcagctggcccaaggaggcctggctgaggtgctgttggctgccaaggagcaccggcggccgcgtgagacacgagtgattgctgtgctgggcaaagctggtcagggcaagagctattgggctggggcagtgagccgggcctgggcttgtggccggcttccccagtacgactttgtcttctctgtcccctgccattgcttgaaccgtccgggggatgcctatggcctgcaggatctgctcttctccctgggcccacagccactcgtggcggccgatgaggttttcagccacatcttgaagagacctgaccgcgttctgctcatcctagacggcttcgaggagctggaagcgcaagatggcttcctgcacagcacgtgcggaccggcaccggcggagccctgctccctccgggggctgctggccggccttttccagaagaagctgctccgaggttgcaccctcctcctcacagcccggccccggggccgcctggtccagagcctgagcaaggccgacgccctatttgagctgtccggcttctccatggagcaggcccaggcatacgtgatgcgctactttgagagctcagggatgacagagcaccaagacagagccctgacgctcctccgggaccggccacttcttctcagtcacagccacagccctactttgtgccgggcagtgtgccagctctcagaggccctgctggagcttggggaggacgccaagctgccctccacgctcacgggactctatgtcggcctgctgggccgtgcagccctcgacagcccccccggggccctggcagagctggccaagctggcctgggagctgggccgcagacatcaaagtaccctacaggaggaccagttcccatccgcagacgtgaggacctgggcgatggccaaaggcttagtccaacacccaccgcgggccgcagagtccgagctggccttccccagcttcctcctgcaatgcttcctgggggccctgtggctggctctgagtggcgaaatcaaggacaaggagctcccgcagtacctagcattgaccccaaggaagaagaggccctatgacaactggctggagggcgtgccacgctttctggctgggctgatcttccagcctcccgcccgctgcctgggagccctactcgggccatcggcggctgcctcggtggacaggaagcagaaggtgcttgcgaggtacctgaagcggctgcagccagggacactgcgggcgcggcagctgctggagctgctgcactgcgcccacgaggccgaggaggctggaatttggcagcacgtggtacaggagctccccggccgcctctcttttctgggcacccgcctcacgcctcctgatgcacatgtactgggcaaggccttggaggcggcgggccaagacttctccctggacctccgcagcactggcatttgcccctctggattggggagcctcgtgggactcagctgtgtcacccgtttcagggctgccttgagcgacacagtggcgctgtgggagtccctgcggcagcatggggagaccaagctacttcaggcagcagaggagaagttcaccatcgagcctttcaaagccaagtccctgaaggatgtggaagacctgggaaagcttgtgcagactcagaggacgagaagttcctcggaagacacagctggggagctccctgctgttcgggacctaaagaaactggagtttgcgctgggccctgtctcaggcccccaggctttccccaaactggtgcggatcctcacggccttttcctccctgcagcatctggacctggatgcgctgagtgagaacaagatcggggacgagggtgtctcgcagctctcagccaccttcccccagctgaagtccttggaaaccctcaatctgtcccagaacaacatcactgacctgggtgcctacaaactcgccgaggccctgccttcgctcgctgcatccctgctcaggctaagcttgtacaataactgcatctgcgacgtgggagccgagagcttggctcgtgtgcttccggacatggtgtccctccgggtgatggacgtccagtacaacaagttcacggctgccggggcccagcagctcgctgccagccttcggaggtgtcctcatgtggagacgctggcgatgtggacgcccaccatcccattcagtgtccaggaacacctgcaacaacaggattcacggatcagcctgagatgatcccagctgtgctctggacaggcatgttctctgaggacactaaccacgctggaccttgaactgggtacttgtggacacagctcttctccaggctgtatcccatgagcctcagcatcctggcacccggcccctgctggttcagggttggcccctgcccggctgcggaatgaaccacatcttgctctgctgacagacacaggcccggctccaggctcctttagcgcccagttgggtggatgcctggtggcagctgcggtccacccaggagccccgaggccttctctgaaggacattgcggacagccacggccaggccagagggagtgacagaggcagccccattctgcctgcccaggcccctgccaccctggggagaaagtacttctttttttttatttttagacagagtctcactgttgcccaggctggcgtgcagtggtgcgatctgggttcactgcaacctccgcctcttgggttcaagcgattcttctgcttcagcctcccgagtagctgggactacaggcacccaccatcatgtctggctaatttttcatttttagtagagacagggttttgccatgttggccaggctggtctcaaactcttgacctcaggtgatccacccacctcagcctcccaaagtgctgggattacaagcgtgagccactgcaccgggccacagagaaagtacttctccaccctgctctccgaccagacaccttgacagggcacaccgggcactcagaagacactgatgggcaacccccagcctgctaattccccagattgcaacaggctgggcttcagtggcagctgcttttgtctatgggactcaatgcactgacattgttggccaaagccaaagctaggcctggccagatgcaccagcccttagcagggaaacagctaacgggacactaatggggcggtgagaggggaacagactggaagcacagcttcatttcctgtgtcttttttcactacattataaatgtctctttaatgtcacaggcaggtccagggtttgagttcataccctgttaccattttggggtacccactgctctggttatctaatatgtaacaagccaccccaaatcatagtggcttaaaacaacactcacatttattctgctcacatatctgtcatttgagcagggctcagcggggacagctccttctgtcctactctgtgtcaggtggggcagcttgagggttgggctggtgtcacctgaagactcattcttctgtacgtctgacaggcaatgctggctgttggctgggggcctcagtgccactacggaatagttggctaggacccctccatgtgggctagttgggcttcctcatagtatggtggctgggttggagggtgtcccaaaaagaaaggaggggatagagagagaccacttttcataacctagccttagaagtcacacagtattacttctgctacatatatatgttttaagaggcagggtctcactctgtcgcccagtctggaatgcagtggtatgatcacggctcactgcagcctcaacctcctgggctaagtgatcctcccacctcagcctcccgaatagctgggactacaggtgtgagtcaccaagcccagttaatctttagttttatttttgtagagccagggtctcactatgttgcccaggcaggtcttgaactcctggcctcaagtgattctcctgcctcagcctcccaaagtgctgggattacaggtgtgaaccaccacacccagcccacttctgccatattctgttggccagtgtgacaaggattgctactgtcctacccaccctcctttcaccacatgtgcacatgcacgtgtgtgcacgtacacacacatacacacacacgcgtgcacacaccagagcccaccttggctcaagtcctcttttctgagaggacttttctttgtggcttcctaaaattcagtggaaaattaattgtttggggatgagaaaggttgaagcaccaaaagcttaccaaggggaatgtttgcctctgcctctgacacacagctctgtcctgggagtgagctggtttttagcggagacggagtcccaccttggctgcagggagtccgaaagggacttggaagctccgctttctacccagcgagcttactcctggtggcagtgggagctgcctgttcagctccagctcaccagccccagtgcccacaggatcagtctgattcccaagctctgctcctctccccagcaagtgagagctgggtgtcaagagggtctgaggaatccagacccggctgcgtggttgatgatctttgcagacaggcaagcacctcctgcctcgaactggctgcaaagggtatcaggtgctgccatccaggttcagcttgtaaatagctcaggtgtcaccctgcaagggatccctgcacttgcagactctacagaggccatgggcctcctgtgtgtgcggctacaggagtgagcactgaggtgtgctctgatcatccactgtgccatgtgccaggtttttggtctgacccactgcttttggtctgtgtgatgatgaaatgaggtcagagcctgcagttattaacactaacgatttgttaatgatagctactgtttattattttatttaatttttttgagacagagttttcactcttattgcccacgctggagttgcagtgagccgagatcacgccactgcactatagcctaggtgacagagtgagactctgtctcaaaaaaacacaaaagtttctcttttcaaaacattttactttaaaaggagccaatttaaagaaaactgttaatagttcaggtaacaggcagatacaggaaaagctgctgacagtgttgtatgaggtttgaggattttgatccaagctggtcccactcagtccatagcagagaatgaaagggcccagagagggtggtgacctctgcctgaagtcacacagtgagtcgaggacagggaggtgaccccaggtttctatgtgtagggcgggaggatgttctgggacacagttcaattctcatttgtcacacactttggctattagagatcaaccccttcgctcctgtgtcttgcaatggcagccttggcaaacgctaaatgaaaatcgtgacaacacttgtgttatgaagcatttactttgtgttcaccttgt

SEQ ID NO: 260 - protein, 1122 aa, Homo sapiens
MRCLAPRPAGSYLSEPQGSSQCATMELGPLEGGYLELLNSDADPLCLYHFYDQMDLAGEEEIEKEPDTDTINCDQFSRLLCDMEGDEETREAYANIAELDQYVFQDSQLEGLSKDIFKHIGPDEVIGESMEMPAEVGQKSQKRPFPEELPADLKHWKPAEPPTVVTGSLLVGPVSDCSTLPCLPLPALFNQEPASGQMRLEKTDQIPMPFSSSSLSCLNLPEGPIQFVPTISTLPHGLWQISEAGTGVSSIFIYHGEVPQASQVPPPSGFTVHGLPTSPDRPGSTSPFAPSATDLPSMPEPALTSRANMTEHKTSPTQCPAAGEVSNKLPKWPEPVEQFYRSLQDTYGAEPAGPDGILVEVDLVQARLERSSSKSLERELATPDWAERQLAQGGLAEVLLAAKEHRRPRETRVIAVLGKAGQGKSYWAGAVSRAWACGRLPQYDFVFSVPCHCLNRPGDAYGLQDLLFSLGPQPLVAADEVFSHILKRPDRVLLILDGFEELEAQDGFLHSTCGPAPAEPCSLRGLLAGLFQKKLLRGCTLLLTARPRGRLVQSLSKADALFELSGFSMEQAQAYVMRYFESSGMTEHQDRALTLLRDRPLLLSHSHSPTLCRAVCQLSEALLELGEDAKLPSTLTGVGLLGRAALDSPPGAELAKLAWELGRRHQSTLQEDQFPSADVRTWAMAKGLVQHPPRAAESELAFPSFLLQCFLGALWLALSGEIKDKELPQYLALTPRKKRPYDNWLEGVPRFLAGLIFQPPARCLGALLGPSAAASVDRKQKVLARYLKRLQPGTLRARQLLELLHCAHEAEEAGIWQHVVQELPGRLSFLGTRLTPPDAHVLGKALEAAGQDFSLDLRSTGICPSGLGSLVGLSCVTRFRAALSDTVWESLRQHGETKLLQAAEEKFTIEPFKAKSLKDVEDLGKLVQTQRTRSSSEDTAGELPAVRDLKKLEFALGPVSGPQAFPKLVRILTAFSSLQHLDLDALSENKIGDEGVSQLSATFPQLKSLETLNLSQNNITDLGAYKLAEALPSLAASLLRLSLYNNCICDVGAESLARVLPDMVSLRVMDVQYNKFTAAGAQQLAASLRRCPHVETLAMWTPTIPFSVQEHLQQQDSRISLR

SEQ ID NO: 261 - DNA, 215248 bp, Mus musculus
  misc_feature (1)...(215248): n = A,T,C or G
ttcaaaagtatttttattactgttttgatgtacagtcttactacaactattagctggcctcaaattcataatcttcttgcctctgtctaactatgaaaaaataacccagcacttgtaattttaaaaaggtaatggggtaatgtcaaggagacagtgaagaggacacctatagccagagaaaggaaaaagcaggaaggtcaaggtgccgtgagcctgactcctccgctccctccccgggattcctgcagcctagcacctcacttcagaaactctgggtactgtggatggctcatagctgggcatctaacacgggtcactgaactgccccaagcctcagtttccctccaagtgaccatcccaaggtgatgcagggaagctctgtgccagaggcacccagttctagcctctcagccaagctcccttcccggcaggaagcctgaggaggaggccttcctttagggatgagggatgacagctgcaagcgcatctcagctgactctcagtgggtaccaagcatcaccaagcccagtctgcttcacaggcagtccacagtgatgctctcttctagttactggccccagaagagcaaggaaccccaataaaggggggtcctggggtaggggtcccttggtctaacacatccaaagtgttggtagaactggggtttaaaccccaaatgtgtgtgactataaaaactttaggaaaccattttaggggtcacgtgagctggctgaagcaatcatacatccataccaaacacagattgctctgttgctcttggtcaggccttactacttctcagagagagttctaggttggtgctgggaactttcatctagcagcactagctcaacacataaagcagttcccagccctcaccattagctggcttcttcttgtggtgacatagcattcacttaaaaatagatccatgcagtctaggcgtgcgcctcagtagtaggatatgtgtttaggatgtgtgaggtactgggctggatcctcagaaaaacctaaaaaacagtaaaatacagtcaagagggcctggggccagagtttagttggcagagtgctttcctagtgttcacgaagcgctggtttctatccacctacactggcactgtgggacacatctacacccataaagcaggcacagtgacccgagactacagccccagcatttgagaggtggaggcagcaggagaggaagcccaaagccacggcagctagacaggaagtacagggccaaacaaagtccacatgagaaaggacgctttttgttgctgctgttctttagtttgtttgtttggatttgttttgttgttggtggtgggttttttgtttgtttgtttgttttgttgttgctgttgttgttgtttttgagacagggtttctatgtgtaaccctggctgacctggaactcaatctgtacaccagcctggccttgaactcagagatcctgcctctgcctccagagtgctgaggttaaagatgtgccgacctttttttttttttttttttttaaaccaaggagcactaaaactctaaggaaaagcattatttaccttaaactctaaaaggaaaagcagtaactcgcagtagagagacctgacacatatcaccaaagctcacagggccagcatggtacagggggcgtgtggctttcagaattctgtactgaggacacacattttcctgccaagatcacatcacctgaatggaatcctgagctcagacggacacctgacaaccccaggcagagacagctggcaaacgccacaccagcctcttgcacattgccaatgtcacacccagacatagacagactgagcatttggtccagaataaagaaagcagtgacctcaaagcttacacacttatcattgaaggacatttctgggacatcaaaagctgtgaataaagccagagagcaaagtgctcctaaatcctatccctgtccagctgctgatttcagccaggtgtggtggcacccaactgtaatccagcacttgggagacagagcaggaggatccggagttctaggccagtcttgattatagaagactccatctctaaaaacaatgacatcttgctggctttgacaaggacactacagataccaagtagatccttcttttaggaaaatacagaccaaaatattcaggaccagaggaacatcatgtctgcaatgcactctcaaatggtttagaacatgaccatccacatgtgtatgtgtgtgttcacatgcatgcataggtatgcacagaggagaaagtgagcttgctcttagcaaatgagcagaaatgctggctgccaggcaggctctgctgaggggagcatgggagttctttatacttttcttgtaactttgctgaaagtgtggaactctaaaatttttctaaaagattttttttatgaggaattcaggattaaaggagcaagcatgtagatgaatgggcctggtgaggccatgactggtgctggaagtgggcatgggagatggccggtcatggggtcatggaaggctcttctgctccctggtggccactgtgctgtgcaggagacacagccatcttatttggctttggtctctggacccctcactttctagtcttcagtttctttacttgcaatgctgagttacctcagcagtcaagaggcaggggcaagaagatcctgaatttgaggccagttggagccacacagtgagatcctgtctcaaaaaataaaaagtctgtgtctttcaatgtgattttgatttcccaaatgcagctggtgttctcagaagttccaggatgaaggcagcagtaatagctgactgaagccctcctgtttttcattcagctaaacagatcccagggctgggaggagagtgtgatatggaggcccaacttttctggctggaatctccaggctgggctaattcagagccacagccatgaggccattggcatctcagctggcctggagaccttttcttcccaaagggatggccaggactactgaagcactgtgaccagggccccctctgtgtgtctcttgagtgagagcaaagcatgtacctgcccccacacctctagaccctctagccttagcttccttcctgttgttctgcatcttccctcaccctgatccgggtccacaggctaccagtaggtctcccacaactgaaatctgaatatatggctgtctccatagaagtagtgggcatcccagctgggcaataccatgctctgctgggtgttctgttgacactgcaggctatagtctgacaagaaaggctaagaaagtagtcatggtcctcaagtgagccatctgaggcctgagagtaagccttattcggtcacccttattgcacagccacactgtaccagaccacacagactctggtggcatcatccccattcccaggcgagagactgtgtctcttctacagtacctcatatgtcaagggaggtccagtgggcaccctcacctgttacacgactctaaagtaattaaccaggctaaggtgtttctctaacctagcagatgggctgtcagcaatccccaccccaattctctctctctctctctctctctctctctctctctctctctctctctctctctctctcacacacacacacacacacacacacacacacacacacacacacacacccctaaggctccaaggccatgtacccaatcacctctcccccagcaagcaaggagttccatcccctactcccccaggccacaatgaacactctacagaaaccacagaggccactttccagagctctagaaccagtgccctggggattatgggcatgagaataggaagacagaggtaggggtgtgtgtggagtgtgtacaccaatgggcatgttgtctgagcccattttgttagtctctggtccttttgttagtcatgagacatgaatattaatgcacaaggcaggtgagggcagataattccagactgcaccgacctgtctataacagcagttgatattcatggaccagttaccatgcaagaaggtccaattctttgtcctctcaacgaggcaaattttcattattcctgctttataaaagaggccaccaatatgtagagttaaatggcattcccaagactgtggctagacctgcaatttgaattaaaaaatctgagtttagagttactgctctgaagctggattgactcctcaaataggtgctcagtaaatgtataataagttagacaccagaggtgaggagcaaaagtggaggtccttgttcttgccgtgattcaccccagcccccacgacctcgtgtgtcctggtctggcttgttaaaacatgactgggagcaagcatgcctggcccagggctcctgtgtttggaaagggtcaagaggcaaggttggtcacttcattctaggtttgtatcagtcatccctcctgcatcctctgggacttgcctttctggccctgggaccaaagtcttctatcttggatggggggacaggtagtgtggtgtgtgggcttcatcagtctccatcccttaccttccctaccccccaaggtcagccaagagtgtcccaaaggaacgcttcttggtgtttctgctcacacagcagttgttgtacagcatgtcaaagcatttgggctctggttttgagcttagaatatgccaatgttttcagttggaagcaggaatgtttctgctgatatggtaagaagataaaataagacattttcaccaagttatactgcctgagagtctacttggctcaaagacagaaatgtaacatgggatcacaggggccgaacctagacgctgtgagaagaaggagggacagtgcttgttgtatgactacgtgagaacattcagaaggcttagaagcaggactggtctgtggtctctacacaggttctgaatgggtcccagggattctatctctgttaggtgttcccagtgtggccttgtccagtcacctgtcacctctggctagacaactaacaacatcctcactggcctccctcctcctacccttttatttagcccattctgttcacggctgccagtcatctgacagaacatgagctggactgtgtcatgccctgcctgggaccatcactggatgctaactgcttttggctatgtcatctatggtccgccactgacctcttttccaagtcctatctccagcctcccttcggctgctgaatgagccatgcctttcccagcccgaggtatgggtactgacaaatccctcaacccagactgctttgctccagaggtatctgtctggctccttctatcaattctggcctcagctcatatctgccatcccttcagagagaccttctcccactctctagttagagcagcctgtgcctattctcctctcatggtcatttcgtacagaccatctgccagaggccggttgctggacaaacagtagcgaacgcatcaatacagcctctaaacttcccattcctcactaggtttctaggtacccacgtgtgttcctcctggaaggcctgcatgccaggttccatctgcctttgctcaccgagaactcaacaaataggtatctgttcaatgaaagagtggatgtcgggctggcaggaacgtgaagagctggtgcatgccctgcctcgaacttggcacctgtgtggataccactagacttactaaagactccttcaaagatatcacgccttgttcccaagaatttccctcttaccatgcattatttccacaacagacagacgatgtgtccccaattccactgttgaaagcctgttcctgcagtgatggtgttaggggtgattaggtcacaagggtggagccctctagtgggattagtgccctttagaaaactatgaggatgaaatgcttgttgtttgagccatggttttctggcacagtaccccaatctaagacacccacttatggcaatgttggcaatcaggtaacacgggagaggaggcgtgaatgcttccttggggtgacatcagtatctgttatctaaaaggagcccccacccaccagctccacgtgcctcctcattgccacttgggctctatgacctgccaaaccccagcattccccagctatagggctaggcccgccccgtgacacctcaacggacccaacagcttgcctggcacaaacgttctctcatacaggccagctgttccctttcccttgttgggagacttcagccagtcttggattcactttatcttttctaacatataacaaaacttcttggcagaagcccaaaggcacgtcttcagtacgaccaccccgtggttccttctgctgaccctagggtgctgagaggccttgcaaatactgcagacaaagccagcaccagctcagaactgcctacctgtcccagagcggcagcctaagaaactgacagcctctgcggttctgagctgcagtaccaacaacccaggatctctgaaacctgactccaaatacagcagcagaaacactgccaaaaggaagtgcggcagtgttgtttgctgaaggtttccattctcccaggcttggcctgaagcccctcagtttaactggtccctcaagaggccgcagaacaaaagtgaccagtgcctcttttgacaccagtctatgctttcaggacaagtaagcatccccccaaaccccaaggtcaccaacaagacaggctaagacttgggggaggagctgacagctccacctcaaaaggttttgggtacaaagcttttacccaagccatggggtaaactgcatgattactccaaatgttcatttctttgggggaaatctcttcaaacactactattcctagcatctgagttagatccagaggaggtggccagagaaatcagaggcttagaggaaggaggttagtctgccctgaggacactaccttctctctccccgaaatacacccccatctcaagggcacttacgggcctcttcctggggtcccatccctgtccagatggtgcccccaaccagtggcagcggcatggtacgggcggctggtccaggccaagagttgcggatggtggaaggcaagtggggaacagtaatcacgacattattccaaatatccatcgaagacgtcaagctctgagtcggcatcgtaaaggccagagccagggtctgaaagtacgccgaggtccaccagcgcctggtccaagtcctcgggcaggaagacgaggcccacattgagaacgatgtattccataaggaaggcgtagtaaaggatcagcacattgacgaagaacaggcccacgtagaacatagagggcagcagcggtggctgcacgtaggagaccagggggcccagagcgtccaggtgggctgcgacccgggcgccgggcatgcaggggccggcgatgggggcggcggccgggcgatcccagcgacctcagccgctgcggcgcccgggcggccggcgagggggcagctcagccatccagggggcgccccggggctcggtggcggcagcgctgggccccgggcggcctccgaagacgctccttgacaccccgagatgctcagggccgggtcacggagccccgggatcgggccacacgggccgctcgcccctcagggccacccccctagaagtggccagcgactcgctttgtacgctgcgctcgcgcgcccccgccgcagctcagagttgaggccgctgctgtctccccgaggcgttcctcaggcaccttcggcgcccccgcaggctcactgcccatcgctgcagccgccaagtcgctctgggcttcccagcaccgcctacccagaggctcttcattcattggccagtcgcatgctcgcccgtatttattggctagctcagtgctccacgtttattggcttgagctgtccgggggcgggtactcatttgctccgccccatgggaggtgctccagtctctaagttgctcttctgcagttggcactccttagactgcatctcgaacttaggtatggagcgtcacctttttggaacttagtttaccccctttaaaatgatgccgggtggaaaaggaatgccggtaattccactgaaaatcttagatatccccaaagcgcttttgttgttttctttttcacggtatagtaagaaaaaaaaatcaattactgagtgcctttgacagaggcattatagggttccatgacacccggatggaaagtaccacaagcaggtcaaatcttctgccaataaggctgcttattgtttctattattttgcagtccatgtttaaaaccaaccaaccaaccaaccaataatgctaagtatatatctgctcagattcttcggtttacagaccacctttgtgcttcgtcaggaggatgagtttgcgagggatcaaaaccaaggtctgtgtgtgcaagatatagacgagatgtagctctacatctgtttttgaaaacaacaacaacaacaacaacaacaacaacaacaacaaaacccaaaccctgaaaacccagggtctcaccatgaagcctctgggtgccctgaaattggctatagaccaggctgtcccagaacatgtagagttccactgcctctgtctcctgagttctgggattaaggtctatcctcaattcttacaaaggcctttaatctaagtcacacttaggtttataggagctggacaaggcaatgtagtatattcccttttcacagatgaggaaaacaaattccagagaaatggattctcgaagctgctgagtctctgtcatttcctttggaggtcagacatgttcttgttctttcatgacttttacatgggaaaccattagcctgatgccagtctacatctctctaattcttggaagcaatgcaaaccattcactctatcaatattcatctaaaaacgtgctatgtgcaaatcttgtcctgggccctggagagaacattggtccctgactcaactcttttcctaggacagtcaatgggctgtcacaggggttaaatagctatgagatgtagaaatgaataaatgagagggtgtggggcacaaaatcttgcttcccaccgaggttcccacttccagtctgggaaggaagtccaggtgtatgtaacctttcatggagatcttggagttctctttctttcttactgaattagttgggaaatggcatgagttttcaataatgaccagaggaaacctctgaaagttcatcgtggttagctttacaatgctgctcacatctttacaaaatgttttaagactaatgtgcaaaagaaaaaggttgtaaggacaaaccagaatgttactgattggttttgtcaacagaagcaaataagggtacctgggcttgaatcctgcgtctgtcacacataaagtgcctctgtgactcagtttcctgaattgtaaaataaggttaataacagcatctacttcatatggttgtgagaattaaataattaatcacttaggataatgacaaatgataatgtactactcaatgctttttatttttaattcttattattgcgatattgaaggttgcatccataatgcataagccacattcccacccctttaaaaaatttttttaaagagttagacccatcaaaatggctcagctgttaagcaaagatgctgacaagtctgaagatccgacttcaattctcagatctcaaatagtggaaggcgagaacttgctttccaaagttttacagactctaagtgcgtgtgtgtgtgtgtgtgtgtgtgtgcgcgcgcgcgcgcgcgcacgcgcacgtaatactttttaagagaactaaaccttgccaaattgccaagggtggtctccaattttagctggggtttcgagacactcttctaatcacaaagctaacaataaataaggtcagatagtcttactccgatttcagcaaaccgtttccgcccaccttgacagtgcccagcctcttccttcctcttgtcccgcctcctctggacggtcgcgcgagtcatgccggtccttgtagtccgttcgcagagtcctgtcgtcaagagcctcgccggagaacttcatttcccagatttcctcgcggcggcggccgtaaagcgcggcggtcgaacggccggttccggctgaatgtcagtgcggggctttgggctggggagcaaggtgcttggcagtctctccaccgcccccgccgccgctggctgggcttgagatgtcgccgcggacaccgggccgctgggcggctcggacatgaaaccgtgaggcaggcgacagggctggtctgcggacatgtttggacgctcacggagctgggtgggcgggggccacagcaagtcctcccgcaacatccactccttggaccacctgaagtgagtgtgcggggcgcgcggcgggaaggccgcggggccgggcgcggacgcccagacgcgggcttggcttgcggggctcggaggtgcgaggaagacaggggtgccgcgggagggttgtatgttggttatccgcaaggctttggagtcagggcacctggcttcgaaccctgactctttcacttctggctctgtgtgtgaccttggacaagtcgcgtgatttttcagtctccagacacctaacctgaaaagtaagggcatcgttgagttttcgttttgtgggctggagttgtcttgatgtcccggggacagacagtggccactgggcttcttggggtagcacttcttggactgcatagttacgaggccattgacccggccagatctggattcgattttagttaacagtatgcatttaggcttcagtttccttcactgtaaaacgaatagagtgacagtaccactttttgtggttatttttaggattggttggataagagaatgaagaaaacgcacagaacatgtacaagtgctctaaaaagaacattgattaaaagaacacaagtattttcagaaggaattctagagggatagtcagcagtagcacctttagagaagacaggaggcttacagagtcctggggaaacagggaagtacacagaagaggctagctttggagttagacctgtgttcaaatcctgacttaatgactgtagctttgggcatattttctctctctgtccttccaatttgccattaccagctgggaactgggaactgtacaagaattgggtaatgttgagcatgttaagtgattgattcaggattgctctacaggagtggctaacagaggcactcaagccttcccagcccattccagttcctttctgtctctaagttccagtcattatacccttgctgtcttctgtggctctgtttattttcacttcctttctagcttttgttaaactgacactcccaagacgggagaacctgcttggtttctttgcacttatattgccagaggattggaagggactacaaagagagagtggtagaagacagagaccttagagaaatgagaggctccagggagagaactggaggtggaggtaccaagggggggcggagaaggcagtttcagaggggaccccagaagctttgtatggggacaggaagatagtgcggtaacaacagaaaggaagacaggggtccctagaaaagattggcaagctaaaaattagatgggacttcccctttgatgttggggtgtagaatggcttctttctgtcatggagcaaggatttagtaaatgtttgtaaatctccaaatgtgaagagctggatgatttgggggtggagaggaaagaggtagagggcaagagtgggggttggtagcaattcagaaatcttaaccgggatggcagatggcccggaaagggagtggggtgtggataagtggctgtgaaggggaggatgattgtcccgaggggctgggtgtcctaccagcctaagcacctgctggctctcacttcacttgggactgtagcccctttaaattcccattattgtgttactttgcctggttaaggatttcctgtttgttttattcatcacaagtctatgagtttgattgtgtcctatatagatagacttaggatccaggtagcttaaggcaagtttcaattctggtttctttgttataatgtctttctggataaaacttcttagtttgaggaaacttttgactgggctgcatgtgatggccaatgggacatttttgctggccaacaatggacacctggtaatgtaaaggacctcaggtcccttcctgataccctgggaatgtctctggttcacttcagaggtcctgggaaaaagagcttgcccaccttaattcaggctgctctgtttattccctttcacagcttcaggaacctgggtattgattggcacaagacctagaagatccaaggtgacttggaaagggggctgcagacatctagtgcctaccccagtgcttgtgctgccttcatctgcattctgagtaccaactcctgggggagactgctagctgctgctaggagaccacagtggagccaggactcttcagtgtgtcaaatctcgggactctagtggtcccaggggtctgtagaattcctttatagaagctttctggaggaggcaacactgtatcagagatcccctaaatggggaagtgtcatcataaggcacagccacattaggggcaccatagtcagatttatggccaatccaggtaggaactcatagctatgggaagcaaggctgtgagaagaaagaggctttatcagacatgggggccaatgaacacctaacgtttgtccagtctggggtgggggttggggagcagaacatgggattttccgtactgaaacaggaaagccaagtaaagcagagcagatcgccttcccggttactaagtgactgacggccccagatcctttaaaacagacccaagccagggaaagcgtgcattcatgcatctcctgccgcagtctctagatcagggagacccaggatgcatcaccctgctggtctccaggacatcattgtcctgatgtagcagtcttggtggaataagaggttaagattttaagaaaattgagagtagggttctttagttgttgattttatatttctttcttcagggtcacagaggtgtaagggggaacaagtctttctctgctcctgagtgctggaattacagacataatgtgtctgtatcacatactgtgtcactataccctaccactgcttataaggcattctttccttcacagcacttccatcttacaaactggaaagaaacttttctgttacacactttttgctaaatagtgaaaagctgtacttgaattatttacataccaagtttggtcagtcacttagttggggacagatggaacagtcaggttgttattcatgacacatcattgatggttcactgccagactagtaacaaggctgtgacattaactgacaaatgtctaccctcagcagaatctctacttatagagtcctttgattgttactgaaatgtcatttggaaagggggccatttgcccacaaactgatagaaccttggttgttatgttgttgtctcaattctagtcacttgatgatgtcaagattcttggtccaagtgatgatcctgctaaattgccttctgagctggtggagtctattggatagctcttgtaactgaacggtgtgttctagctacaccatagcagagagcgggtgcttagttagacgaagctgcctcctttcttctggtctcattctcagcaggttctgggcaccactgtgtcagcttagccatgcaaatgggaacgaagctccttttctctttaaagcttgtgttactctcacccatgctgtgtcatcctactccagtccctgttacagattgcctttgcttgccagagttccagaaggtccctttcaacttggggcacaggccatctgaaatgaactaaagcccagaattcacgtcgttctcaagccttactccctggccttgcctactagctcactcccagaggttgccaggtcagctgacatcctatataaaggctaaattcatgtaggtctcaaagtatttcagactttgccctaccattgagcctgggaacacaggcacatgactattcctagtgagcaaaacccctccaaatgcagacctggaggatctaaggctgagtagttattttcaggttagtagggtgccagggatgggtaggagtggagggaatgactcagactcagcaggatgccttgagagagcctcctgaaaggttgggtgaatgacccatgctgtcagagcttcagtgaggtctaggaccctaagtactaaggcttgatcccactgggccttatgagccacactagagaactgagactttatgctgcaaagatttagggccctttgttatcaaggaaggtaaagagttggagagggtaaaggtgggccagcctggaaggggaaaccacttttccaacggcagccatgcctggtgagttactgtgacacctactggaatccaagcttgttgctgtggtggcccttctctcagactgcagtacatatctacatgccatctgtctgtctgtgccatctgtctgcacgcttgttctctccactcagctttcccctccttttcttcccatccatccaaatacctagttctatccttaaattgctgctgcttttatgcaaagtgctgcaaggttttaaccagtgagaatctcatgcttttatgtactgtctaatcctttctgggagtggattagctaccaggtcttgtagattctccaagcttcattctgatcttgagtttagattcctagggagctggccaggtttccacaggcttgtcctttgtcctaagacagtgtcttagtttgtatacatctgcttgtctttcttcatgtgcacatatgcttcatgaagtcagggatctgtggtttgttcgtgtggggattgtccagtacttgtgcagagccagatacatagtaagtggtcagtaaatacaaggtgaaccaaagaggtactcctgaccattctttaagggcctgtgcaagagctgtggcgttttctagggcaaatggcccttcctccattccccttccttgtatcctaggctccctcctactctctggcctggtttaatgtctttggggtgattcaccagaagctgttaacacgttcctctaagcctccaggctgatccaccagcaccacttagttctgtcgtccagaatgctggacactgagcagatgagttcagggcccagaatgggactttctgggggctgtcttgaggatttcagctgctgagaaggccaaacagacacagtgtcctcgacttctttctcatacctaaggccttgcgatcggaagatgagtgtgatttgggggtgaattttcagctctgtcatgctatatatataccttctcccagtgctgtcagcttgtggacaagtttctaggttttccaatgggagcgtccacagtacaagtcatcagactcacagccagcctcagaaactgcctactaaagagaacttgggtcttaggtcctgagcttctttctctaaaatggacataagactgattgtcgacacaggcttttgttaagtgttgtggtttgacttgtgaaataaaactcttgggaaagcaaggtctagggaggaggtggatttgtttgtatctgtagtccttggtgatgaacctctggtgtactggttccatgctggcagaaggctataggttttcagtctaggctttgcaagcttgccagtgtgcaggagtctgatactgagatcctacatctgctgagttcttctgggcattgatggccttccttacgatcgctcagatactgtcttcatgcttcttttgtttttcttatcgctgacgtggggctttgctctgtggcaatgcgtacacgtatgccgtgcgtctggagtatgttcactcctgagttccttctcctccaccctcctctcagcgcatcccttctcaccgtggtgctctttcctttcctttgtaacctactgaagccagtttgtactgcctgctagaattgacctagcttgtgggttagtctggtgcggtggtcaaagagcattccatagtacctcagtcctccaggatgttccttgagcactggagggagttcatgccacgtggggttttttgttttgttttgttttgttttgttctgtatttggtttcctgttatgctctcataagtccatgcaaatgcattgcttataaaatattgtttttatttactttattgatttgggtttttctttttcttgttttgtttttgttttttcctggttttgttgttttttgatagggtcttgtgtcaaacttgctatatagctgaggatgaccttgaacttctgaccttcccatatccacctcccgagtgccaggactgcaggtgtgcagcatggctgtgttttatgttttatgcagaaactgagccgaaggctttttacatagcaggcagacacactgccaactgagctacagacctggccgttgcttacatttttctatagtagactgggatccaattgcctggttttaatcatggctccaaccatgtggtgtggatccctgggctcctccctcagctccccagaggaccaactccagagttgtggacagagcttgcaatagtaaacatatttgccttttgaaagagaagattcaaatgcatatacagttccatgggaaaacatcattgtcgtggttgttatcttcatttgatctctatttgctgtagttaaagcacaaagtttggtttggtcttctgaaactgttgtaaatagggctcagcttgtacatgaagtctttgtaacttccatgttcatctaaaagtagggaatatgaatgctcctggaaggtgcaagagacattgctatgggcattcttttcatttgatattcataagtagtcatcaatagcaaacatgtttttacttcagtgtcaaatggggaaatggcacaaaatggacttaccatgaaccccaactatgtaagtagaagaaaatccaagtagtagtcagctctgggcagcagagcagctgacaatctcctcttctcttttcttattgtcagaatttccagtctttctaatatgcattttacattttgaaatagaaagtttttaagcttagcatctccaaatactttaatgaccttctctctcaaagctcaggaatagcgatccagccagcttctccgatactcacaggtgaatatattttgagggtctcttcctaaaacattgcccaaagcagagtgctaggccctgcagagatgagaagctgggcaaggtcaggtgttagcatcacagagcgtcagcacttggaatccagtgggcatgtctgtgtgtccacagcagacttgtggaaagtagacatactgagcagtactatctacacggaacatactgaacagtgctgtctacactgaacatactgagcagtactgtctacacggaacatactgaacagtgtctacactgtactaagaagcttctgagctcagctgtgcggctcagtggcagggtgtgtgaaggatgtgtgtaacatcctgagtgtgactgaggaccagagagaagtgaggggagaaggaataaaagacatgggaggcaacatccaaccgttgtgaagatgtcagctcagctctccaaacctagctaggatttagggcagtgccaatgggaatcctagcagcatttttgtgtgtaaattggagctgttttaaaatatttgtggaaatgagaagcttaaaaaaacgaccaatatagtattgacagaatggaagccaagaagttggagggctacagtgccacataacacaatttatcatgaagctgcagtgctagaggacataggcttgacactggatagacaaattgatcaggagaattagaccaactgcagagactcacatatgtggtcaccaactaatgagaaaagtggccctggagtgagcagagaaatgaggaccttgtaagtggcagtgggccagccaggttatacattagtgtgggctggcacctgatactaccaagaaaacaggaccctttataacttaacgtaagcaaggatctctatagatcattatgacaagagctgtctggaggtcggcaatgtggctcagtgggttaggtgcttgctgcctagcctcatgacctgtgtttgaaccttgggactcacataatggaaagagaatcaactccttaaagttgtcctctgagttctacacatgttatggcatatgtgcacccatgcgcatgcatataaatacaaacaaataaataagtaaacaaacaaaataatgtttcagtatgctctctgaaggaaagattggtaagactgacactaataaaatgtagagggctggtgaggtagctcagtgggtacaggtacttgctgtgcaggccttacgacctgaattcaatccctaaacccagtgtggaaagagagaactgctcttgcaagttgtcctctgacttctacatgtgttttatgatatatgtatgcttaccccccacccccataatacacacacactaataaaataattttaaaggctattataaagacaaggaaaagagaggccagtatggagataaagtgtatccctgtatgaatgagcatttaccacataagtatggttgtcaaggaccccagtgctgaaaccactggaaatggcaaatctttccctgggtcaagcttaggagaatggcaaggctggagttcagatgttgacagcgtgtgcagaaagtatacatttactctgctcccagataactgtagcctgagactgctgccctgcagagatcctctaccaagattagctgatctgcttcctcattcagcgctttgatgcctagttgctggtgtggctccagcatgccctggcaccctaatcctggatttgctgtgcatatatctgttgtttcttcattcctggttgctctagtaaattagtctcaaatctgtggtcacagcaccacagttggggaaaacaagctagaatatttattatccagtaaaggatttatatagagaatagataaagtaaaggatatatatgtatatgataaataaagagttctactaataagtaaaagtcacgaagaataataaagtgggcaaaagtcttgtaattggccctgccctaaagaggaaatgcaaattttccatcaccgtgtgagagaaggcaccatttcaccttggtcttcctgaggtaaaaccccccacaggacaccatgaaagcctacagaactacaccaccaaaaaaggctgaggacaagtattggagaggctttgagctcatgagggctcttaagcgtgcctcccagccacggggctggcaaggactgggtgtagctaagccctttgtgctaccttggcctgtgcagtgcttacactgggtacatcccgtggttaggtgagtctgagagtcatgtgaaaccttcccttggtgccaggctcctgggagctcttagcatcttctgactagcctgtccttcatctctgaaaaagccttctaataggatgttcttctgtttctttgtgctttctttggagtttacaaccctttcctatcctccctccaagtccttccatatcatcctccccttcaaatccatggcctcttttcactaattgttactgcatgcataaatgtagatgcatgtgtattactaaatataatgtcttctgtcagtgtcatgttacttgtgtgtatgttttcagggctgtttgacagtagacaacaacagtagacagagccaaagtgtgctcttctctggagggagactacctctcctgcttctggctctccttagttgcctgtagttctttgtgcaggattgaagcctcatgggctttgctccgtccgattcattggtgccgtccttgttcagaacatgttcgggcagtcatgttggtgagaccttatgggtgtagcttctgatgttgtcaggagacacagtttcacagcaaacaccctggtcctcttggctcttatattcttcccaccccatcttctgcaatgttcactgagccttaggtgtaggagtgttttgttgatgtgtctgtcaggactgggctttacaattctgcattttttgattggttgtgactttctgtagtctcctctgttgcaaagagacatttccttgatgggggctgtaaaccacacttatgtgtgggcataaggacaaatgtttatagattgttgttagggattatgctggtttaataaattagtgcctgtagattctccaatagccatgacttcactagcactgactagttagctaggtttccagcaccaggcatggtctccctcttgttgaacagcttttgagtccaaggtatgtgtgcttctggttatcatggcatgctggttgttgatatggtccatagttgtcaaagctggtagggctgttggttgcttccctccctcctttgccttctgataccatgaaaactagttctcaaagagagggtgtccagctggggctttggaccctgtttctgaagaacatggtgtcttcagcaataggaacttaccttccactcttggggataaccaagggcaacagcaataggccgtgtgttttgggagtctcttagacagtcctggccaacaactcaaaagaaggcttcacatatttggaattggagtttttaactaggtagtcattggctcactgcgggtgcaccaccagcccagatgagaaaagttcccaaataagacttttggaagcaattacataatgaaggaagctatcctaacaactagcactttagtggcccctccccttctctcctcctgtctcattatataaccctggctggcctggaactcacctacttctgcctcctgaatgttgggatttcttttaaatttttgtttgtctgtttgtttgcttgtttttttgagacagtttctctgtgtagccctggctatcctggaactctgtagcccaggctggccttgaacacagaaatcctcctgcctctgcctcccaagtgctgggattaaaggcttgcaccaccacttcccggctaaatttttgagagaaggaatcactctgtagtccatttaggttagccttgaactcagtcaaagtagtcctcctgcctcagcctccctagtgctgggcttccaggtgtgcatactctacccagcttgacttatctgctcttcccaatgccaccaggaggacgggtgcttccattttacagaggatgtcatcaaagtacagaaagatgaagtagcctgctgcctcgggattaccaggttgttagtagtgatggagacatccaggcctcagtgtgccagtgcaggcatctgtaatacctactgcctctccagaagggacccacaagtttcacttactgctccaagttccttggacctttcccacctcagtttttccctcaaggtccttttttgctgactgtctgggaccagcctgatatcaccttctaaagtctggaattgaacaacctaataaggatgtttataacaacccccatcatgatgaccacagtagaccagcagcagctaaaactgcttgggtatggtgcatgtgtgccaggctccacacttagatgtccagaacaccatatttaatcaaacaaccctgtgaaaagtcctccgtggttactactgtggtacttctgtgttcagacagagagacagagagctgagtgaaatgcctgtcacagaacacagttaggaggtaccagggacagggtcaaccccaaaactgttggattccaaggcctgatgagctcttttgttggtggtggtttggtttggtttttggttggttggtttgcttgcttgcttgtttgtttgtttgttaagacaggatttttctgtgtagccctggctatcctggaacttactttgtagaccaggctattctagaactcacagagatccacctgcctctgcttcccaaagctgggattaaaggcatgtgccaccactgcctgccctgacaagctcttatcctagctctctgctgttttttgaacccttacttgtatagtatactcagtgtgtattagtagaggctgtcctctgcttcactcagcgtttatatagcacttgttatgtaccagatattctagagtatattggtgtcaccatgatcattaagatgactttcctgatatggaggttccagtctagtcagagagacagaccatggagaacacagtgctctgtgaagtacttgctacttcccaagaggggacagccaggtcctcatgggagttggcggattgaagtgaaaaagccttctccaaagaaagcttcatggagagaggcagagtcttaaatatgagcgagcagcagttgctgactgataaggcagcaagggcagtctattcagacagcccactcagttgaggtcagaccctcagagtagatgagctcactcatgttgctgtttcccagtgagccaggagtgtgatgtgtgatgttagcacgtgtatgctatcctgcacatgtgtcatagctccagagtgggaagactgcttctccctgacctgcactgtcagcattaccttgtccctgggagaatgtccattgtcctgtggactgtgtgaaaaggtcattgatggccacattgggagtggtgcagcagctgtcagattttaagagagagggctggagataatagctgtgttgtagagcataggtgtagtgtgtaagaggccctgggtttgatcctcaataatgcatgcatatgcacatgcacacaccattttgatccattcacccaatagcctgattcagtggggttgcatgggagctgcatggggagcaacgtaaacaggcaaaggaggtgcaggaggcctgtgaaccacagtttaggaaagtgtcccttgagtttcttgtaagggtaggcactagaatcacagtggacacatagctttgtaatgaggtccctacagtttattccagggtggttcaggtgctgctgagtcacttccttgtacaggaaagtgggacttatgtccttacatgcagcattgtgggaagacctaagtaccaaggttggatgagttttctttttagagggctttaccttgtggcatgctaaaaattgtacttcaggctggacatgactgccaagatgagcagattacaattctaggtttacctgggctacagagccagttcaaagccagttgggtcaaattcctgagatcctgtctcaaaataaaatataataataaaaaatgggaggtgactattggatggagcttagagactcttatggaagagttggaggaaggactgaagaccccaaaggggataggagcgccaccagaagaccaacagagtcaactaacctggacccctgggggagttctcagagactgaaccaccaaccaaaggtcattcatgggctggacttagaccccctgcacatatgtagcagataagcagcttggtcttcatgtgggtccagacaactagagcaagagctattcctagagttgttgcctgtctatggaatctgattcctaacttgcctgtcttgtctggcctcagtgggagaagcaccacctagcccttcagagacttgatgtgccagggttgggggatactcaaagggggcctccactctcagaggggaagggggatgggaggagggacagatcaggatgtaaagtgaataaaaaattaaataaaatagagtcaagctaccctttattaagcacatatgcattgttataaaagaggcttttacagtaaaataaaaatatcttcttgtaaaaatgacgataaactaatctataatgttattttattctttgtaattcatgacttaccaaatagtaaactatgtcttgcaacattgaaaaaataaagaaaaaggaaaaaggaaaaagaaaactggaaggtgaggttgtagctttgtggcagagccttctctgtcatgtcagacagcacagtgaggacagcgtagaacactaaacatttgggctgggagcagctaagtctaattattccacctccaaggtctgcctctctttgttccctgcttttcgggactgtgggaaacagctctcccagcctctgatagatgtcttgagccacctccttttgatcccaattaaacctgtggccctgacaggtgaagtctcatggaccttagcctccccagccatttcactctagatttcgcagatgagattgttcttgggcaggagtcactccttcggtcctatacccagtcctggtttccatggtgtgctgcactagagggaactgtaagcattcggaaagcagtgtttagtgtcctaggctctggctaagggatatctgaccctgtcctttgactccatcaccagcttttttttcaggtacctggcactgactactgtttcttggcatccatcactgatgactgagataagccacacttattcttcctttagtttcactgaatcggaatccccatgtgtgctttgggagcctctgattttgccagctctgtaatttgtttgcatcctgaagttttttgggtgctggtttcaagggcttggtatgctcttgcctcaatttgggcagatgtgtccctggcatgtaatgcctcagagctccttctgccatattttgggggtgggagtgacctctctttctatctgaatgggaaactgggctaacataaacttaaccactgctgtgttgtgagtgttgccagtggcccttgggcctggctttcacatcagtttgagtaagctcttatgtctccctttttttctaggtacctgtaccatgttttaacaaaaaacaccactgtcacagaacaaaatcggaacctgctcgtggagaccatccgttccatcactgagatcctgatttggggcgatcaaaatgacagctctgtgtttgagtatgacttgcagtgcttttgtttcctggttcttccacttcctttgggtgtctttccaagtgtacaccatgagtcattcctgatgacgtcaggaactgatactaattccatcttgcccgaatatctgtatcaaacgtccttgagagaacgttgaggtgcaagccaaaaagggaagagctatggaaatgagtttctctagaaaagctgaagatattgtggataacattccaagttgagccctatcatctgctccagggcaagaagagtgtcctggatattacggtcctgccctgagggagttgctgaaggccagcatttannnnnnnnnnnnnnnnnnnnnnnnnnnnnnnnnnnnnnnnnnnnnnnnnnnnnnnnnnnnnnnnnnnnnnnnnnnnnnnnnnnnnnnnnnnnnnnnnnnnnnnnnnnnnnnnnnnnnnnnnnnnnnnnnnnnnnnnnnnnatgtggtacctatgcgtgttggaacatatgcaggcatatatttaggtgtatatgcatgtgtgcacacatgtgcatgtttgtggagatcagaggttgatgtcagctgtcttcctccaccattctccactttatttactagaattaaggtctcttgctgaacccagggcttattagttcagtctggaccagcggttctcaacccttgtcacagccttttcacagggattgtctaagaccagcagaaaacacagctgtttacattgtggttcataacaatagcaagttacaaagttatgaagtagccacaaaaatgattatgtgattgggagtcaccacaacatgaggaacctgtattaaaggattgtagtgttaggaaggttgagaaccagtgatctaaactaactggccattttgtcctcaggatctctgcccctgcttcctgagagcttgggttataggcaggctgccatacccacccagcttttctatggattctagggatctgagctcatgcttctgaggctggcactttccccactgagccacctccctagcctctaatacaaacgtatttactgagggccagcaagagtcctgagctttgagagcacaatctaccaaacttgcccctcggcccacatggaagctctattggtgtccccacgtgtagctggaagatggtgaaggagcctctcattcctagagtctaccaaccggaaaaataaaaattcttgccattcaagcatgaagttgaatccccaaaatctatataaaggctatgtatggtaacacacatttgtaatccttgtgcttgtatggtgagatgagaggcaggaacaggaaaatccctgaaaagtggaagacgggtcaggtagcttgtacatgcaacaacaatgatacctgtctcaaacaaggtagaaggtgagcacaaacacccagagcctcctctgacttccatgcactcagcatggtgtatgaatgtcccaacacagacagacacactggacacacagagagacaaacatctacttgagagcgtcacactagattactaagtcaccccagcagcaatatccaggcacagatgtttgacagcttcctccattggccacccagtggtattgagtgtgttcatgattcaggagagctgctgctttttataacctgaagcaggggcagacaaaaataggtcaggggcctgaaatgctctggggtcagttggagcagtgtgtggaggcaggcaagctcctggagtcagagcaagaaaagaactgacaggttttagggtcatattttatcattcacttattttattatttactttatggattcaaacagaattatgtggcattgagtgtcaggcaattggtccctgtggagctgacaggtgaggagagaggaccacccagaacggagtcaaccagcagacttgtgtgactgcaggggcttttccttttctgtctgtctttctatctaacattccttccttcctccctccccctctctctctttcccccctctctccttccccctttctgtctatttgtcttccccctctctccttccttcctccctccctcccttcctttctctccttccccttccccttttctgtctgtctgtctgtctctcccttccttccttccttccttccttccttccttccttccttccttccttccttccttccttccttccttccttccttccttctcagaaacagtttcctatattccaggctagctacattgaattcatagtgtagctaagaggctgactttgaacttctggctttcctgcctctgcccaagtgctgagattacagatgcatgcttccaacacttgccttgtgttctgctgggcaagcactctatcaactgagctatatcccagcctttgattattccaaactgatcctgttcaaatatactaaacaaatatgtagaaacaacatcttcttaaaggaaggtcctatttttaacacacacacacacacacacacacacacacacacacacacactcacacacacacagaactgaggtgtgtacctggccaatgctcctggctgtgtgtcattccagcacaagaaagcagaagcagacctggggactatagggtgcctctaccacatcggtgtcttcaccttctttcaagttctttgtccagagatctggaagctgcacacttgacaacagaagtgaaaaacctctgctgtcattcagcatcctcaggccttgcagggaagccacttcttgtgttttcctaaccttgaatatgggagcgcaagggaaataggttttgtggggaagctaaggattccggttgtgtatgtcctggggaacgatgcttgtggtgcacagactgctgtgtggtcacttagcaggaagagagcatccctattctgtcagaatctagttcaccatttcatgtaagtagcaccaccctggtctgcttagacaggaaaaggaagagtcagagtgcatgtgttgttctcccttgcagatgggatcaagggcactgagactatccaggcagccctaacagtctagtcttgccactggtgatcttcatagggcgagcctacacatagcagccgtgagcgtatcacccactgaccctttcttgttctttccccagcttcttcctggagaagaatatgtttgttttcttcttgaacattctgcggcagaaatcaggccgttatgtgtgtgtgcagctgctacagaccttgaacattctctttgagaacatcagccacgagacatcgctctgtaaggacactccttgccgtttgcctgtgtactgctcagtgtcggatggttccatgtgtctgcgtcccactcattttagtctgcccaggctttatcccaataggcttagtggcgtgtgtttgcccactattctggaagacggatatccactttgaagctgaggtcagggctggtttctggtggggatttctttttagtttatagacagctgctgtctgagtctgttttcttttactgtaacaaattcactgagactaagtaattaaaaatatcttttatttcttatgtgcatgggtgttttgcctgcacatatatctataatccatgtgagtgtctaatgcctgctgagggtattggataccctggaactagaattaaagatgattatgagccatcatgtgggttctgggaatccaacccaggtcctctcaaagagcagctggtgctcttaaccaccaagtcatctcttaagctctgagaaactaggtcatttaaagaaatgagctttattttggcttaagatttagaaggccaagaagttcaaaattaggtatccatgccttgtgagaaccttctgctgcttcaactcacagtcaaaaaggctgtgtaaaagaaaccatatatttgctcagtaagcgcatggtaacctgatttcttttaatctgtgagctttacagagcaggtaatccccattgcaatgcttcaagtgtttctttaaaatttgtgttgcatttacctctttgcgtgcttctctgcatgtgagtgtgtgcacacggccacactgcagagtgcacgtggcagtggaagagatgtgagtgtgtgcacacggccacactgcagagtgcacgtggcagtggaagagatgtgagtgtgtgcacacggccacactgcagagtgcacgtggcagtggaagagatgtgagtgtgtgcgcacggccacactgcagagtgcacgtgacagtggaagagatgtgagtgtgtgcgcacggccacactgcagagtgcacgtgacagtggaagagatgtgagtgtgtgcacacggccacactgcagagtgcacgtgacagtggaagagaggtaaccgttctccttttgtcggtggagttcggcattggtggcaagagcctttactttctgagctctcttgtcagcttgcaggaacttgctcttaaggtaactaactcgtcaagggccaggagaggagaaattcacagtgagaaagatattaacccactcatgacagcttcactccatcacctaaataccactcataagccttacttcctaacgtggcctcatttcaggaatagaggttaggactcatgaaacctggggccacattagaccttagctaccttctcacagtacctggccccgcctgtgagagaatgaagtcagagagctcaacctctgggtctctctgactccatggggcactaattctgtcaggggtggagcctgaccctgcaaactcatttaatcgtaattaccctgtcatcacatgtagtcacactggaaacgacatgtgcagcttttgactatgttgagggtagttcagtgtggtagggttccatgaaggactcctgctgattgacttgccatcccctcagcatggttcaatttcaaagatctaatgactgaggagtacataggccagcacttctaagagcaatggagaaggcagagaggtcttaggggtgcctctgcttcagttttgttgcccagcaagcaagaatttaactcagttcaaccctcagccccatttattcttctgagaggcaggggctacggaggctcttgttataactccaagaaagtttgagtcatggacccaaagtaaccagtacagcacattcagagtagaggagagattttagcacaggagaatacactcagtggtcctcagtgtggtgctggcattttctggagctgctcttagttgtcatagtccatccgagtagagggaggctgcaatccccagggcagaccttcagcagagcattaccagacccttatctatgctgggactgagccagcctaatttcattctgtgctagttacttactccaaatgcagcacagtgcaggtcctgctcttgaaagcaagagaaaaaacggtggagcgcccagagcaaaggcaggtactgacttcttggggcaaatcaagttgctgggtggtggtgaccttagcagtggccactaggtggtgctgtagccacagagccctcctcctcctccccctgaccacagatggtgctaattcacatctccctgtgtggtttcccttgttatcagcttctgtttcgctggatctggaataagtgtggtttctgagctcagaggggaagatccagctctgaggtgcaggctcaggaatgttctgaggccattgggacaattccaaagtcttgacctttaatatggggtctttggagttttatcttggtgacccttttgaaatccatttagggctaggattaacagtacgtcctttgaaagttttagcttcttggtgaagtaccttgaagatctgatgtaaatcctttgaggtggcctctgctgtgcagctgacatgtacatcacctttcagaacttcctgtctgaggatttcagacctctaggtcggagccattagctgtcatcacgggtcaccaatctgtaatggagaacttagctgcctcacagggctcttgtgacctttattccagtctccccacttctccagacatggctcctgatgaccctctctgccctctgcattggtgctatttcagattcgatacaaaagtgatccgacatgtgcatggctctaaaaggaagtgggagcagtgtgggagctgcctgcaaagcccagcagacacacacctttggctttcaggacagtttattaaaagtagcttttgaggcagtgttctctttgtagtgtagtttggcctcaaactctcagtcttcctgcctcagcttccaaagtgctgggattaaaggcatgggccacaacacccagctctgcttcagtctctgagtgccaccatcacagtatatgtatgccatatgccctgctgcttttatttttactttttagttttagtgggggagtcattgtaaaacagcataacatagtcacagaagtgcagtcaggtgcctgtagcctcccaccctgcacccagccatgcaggccgtcctactcactctgctgttcctgcatgtgactcgccctgatctatattgttattaaatgaacctgactgtgggcatctaggtgctttccaggttctcactattacgctattacagggaggcattgcacagatgctactgttgcctctttgtttggtgacctaagtaacagaggcccaagagactgagattacttactgactcccaggtttattataacagaataccacagaatgtcagccacagtgagggggtagtagaaaaatcccagccacacagtgggcccctttactgatccctaaccccccacagaaccttgtagaggacttaaaaaagcccctgtgaggagcagatgaaccttgtggctgtctcaggtgtagaatgtagccagactttcttcacacaccttaagctgctagcttttgtgccatttgtggcccagaagcaactggcctataaatacagaacttactgagatgtcctaatttcctcctcctgttcccattgccagatcacaagtgttccagttgtcagaagcacctaagtattatgttacatggtaaatcacaggtggataagtaagttggggacagttttaacagcaaagagggggaggtagtgtggctatgacaacattcagacgcagtgatgagagagaccagacactgacagcctcatcctgtttctatgacaacactcagatgcagtgatgagtgcgaggccagacactgataccctcatcctgtctggctcctctgtgtaaggttcacaagcaggtgcacaagtctatagagatggggttggagtggttccctgccttgagagaagatgctgacagggcaggggtatgaacaagcttccgaaggaactgcagatacaccgggccttaactgagtggggcctgcacagcatacatctgtatctatgtcccataagcagacacctgaggctcacatgcttgagtgttaaatgtgtgtgtgcaggagcttgaggttctatacagtgccatttccacatatagcaagcttacctggagcacttgtgaccatgacttacttaacaatgtattcaagatttttagggccccacccactctcctggcctctcttggagctggccccaagagctgcctcaggtatcagagacacgagggcagtctggctgcattatctttcaccatgatgatctctagggttggtttagctgatcttgctggctaggttcgttcactatcttgggtgtattccttcataaggtatatgctctgttgacattgccaacctccccgacagaggtcagaggtgtgagtagtgctgttccccttagaaccaggttagtgttgggtagttaggacctgaggtggttaacctgatgctagacacatggtggggataaagggactcttatgagattgtcagtagatagagattagagacacatgcagccctttctggcattctggcatggtaatgtcttctgatggccatgtgggctagcagtgaacagaaaacatgcttgagtctgtctctttgggttcacaaaggaggccacaggcttctccctggaagggctggtgggcctgcgtagtgtgtggtttcttagacaggtaaaggttaagccgctctttgttgctcactggttgagttgtgcttgttactcggcggcctgtgctggcatttcctccagcccgagctcaccggttgcactttgtgttctctctcctagattatttgctgtctaataactatgtaaactcgatcattgtccataaatttgacttttccgacgaggagatcatggcgtattacatatcgttcctgaaaacgctttcattaaagctcaacaaccacactgtccatttcttttacaatgaggtgagtggcgcccagcaagtgtatgtgtcaagctagtccaagcgtggaggcctttgctctacaaagcactttcctaagcacagactttggcatacttaaataaaattttttgttttaaaatatgtggtgtgtgtgtgtgtgtgtgtgtgtgtgtgcgtgtgcgtgcacaggggcatgtgttcaagtgtgtacatgtgtgttctgggtttgtggggccaagcaagggctataaaattcctactttgtccctctctggtttgttcttttggatctcttcctggaccaggagcttgtttgcattttgcaggtaggctggcagccagcaaacctcgtttgcctccatggtggggttagaggcatgccaggccaggccaggcttgttaggtgagtgctgggactggcattctggtcctcagaactggttaggaggcgttttcaaccgctgaatcccacaaacttttttcttttttcttcttttccttttgatttttgagacagggtttctctgtgtaacctctgctgtctaggcactcatgctgtagaccaggctggcctcaaactcatggagaaccacctgcccctgttcccgagtgctgggactaaaggtgtgcaccaccacacctgacacaaacttttttctttaattgaacaaattttcttgctattttaatgtaaacttcaggttaacttggcagggaggaaaatgtccagaggttaccttgttggaaacagcagaaactccatttaggtacagcttttctgctccttgcagtgtgacaagagaacttccaggcctctctgagccccctcctttgagaaatgaggtgaaactatatacctggctctgggtttcagggactcactagatgagattccatcttcagagttgtgagaagtgataaactggcacagctgtccttgaggggtcaggtccctcacagtcctgggagagctactcttatagcgccaaggagcttgagattaaggtcagtttagctcacatgcttaaagtacaaatggcagctgcgctctgcctcactgtaggaagggcccagggttttccagcttcctgctcagtaactgcagctggcatctgctcaaggcttggttccatgtggccgtgtgattgccgatgctccagatatcactcaatcacatgctgttgtcagaatttctgataccatttcctctctcgtatcccttctgagagaactttctcagaaaagtctgagaattcgccctcagacttctccccatgtcccactgattagagttgcaccagtctcttcagtgtgttggacttcaggcttggctgactagagctattttactcagtgccccaagaggctgatgtcctctggaggctggaatgtggctggagggtctgcttcactgtcgtggtggttagctgaatctggttgtgcgtgggagaccacagctcctgttcaggggcctcttcccagggctgaccagcatccttccagccaacttccctagagtgagtcacccagcagaccacggtaagcagtgatgccatccatgccagcctcgtgccactcacactcactcactcacatacacttactcctagcatactctttggtcacacaggcatgatctgcctctgtgggcggatccagcatgagtgtgacacaggtggtgaacatgtttggggactgccttggaagctagatgtcatacagccagctgcatgtcatttgtgtggcagatatcacctgagtggttgtcccacatgctcaaagcctgtttttgaagtcagaccacaatcccaaactttctgagtttgggcaaaaaccatcaactcttgttgtatggcaacagtgaaccttgattttcatgattcattagtctctcagaagaaaatgctagccaagggccaaaaacatgaatgcacttgagaaaataacatgatagactcctgtccctgccacatagtaggtgcttgataaacatgtccagggaacagctttcacccaaaggctctcccatgtggaagaaaacccagaccagagtgagggacagagtattttttgctcaggtgccttctgagtcgtagtgggagggcagaagtcatgggtctggaagagctggacatcccagaagccttgaggattttttggtttttgtctgtgtttgtctgagccagattagtagtttccactttttagattcatacttgattgctggtcctcaaaatggaattgcccttataattgccctgttgttattttgtgtatcctgctccattccaggaagggctagcttagaggatctctgtctaccatcccctctcctgagccactcacacagactgggtccctgaacgatataggaacattggccacaggaggacagcaaagtacactgccagggcatttttgctccatcctctcaggctaaggcagtgtgagtcttgttctgaaccatttaattgtttctctttgtccccttttaacagcagaagactcctaagaccctctgcctccctgataatgctacacttttagtatttccaaatggagaatggtataacagccaagacatgcttgaacctactccaacttggtctttaatcaaccaggtctgacgtaaataactagcactattctccatgcactgtagatgccaaggactaggcagagcactggaccagaaatgacctcatttcgtcccagaggccagagagtgtgtgctagtaccccagttttataggtgaagaagtggactcagaaatacctcctcatacagctgaacatgtaggccaggtcagacattctgtgtacattttctcttccctggcttcctcacctcccatcatggtgacatctggtgtgttttactttggttttgttctgttttatcacagtctgacacatttcagaaagctttgggagcaggtctgtctttggatttgtaacttttggaaccattttttgttttagcacaccaatgactttgccctgtacacagaagccatcaagttcttcaatcatcccgaaagcatggttcgaattgccgtgagaaccatcactttgaatgtctacaaaggtaagtttcctcgtgcacttgggcttcaggtcgtaagccaagtgctggctcccaagctcacaaacacagttccaagttactggagaccttgcctagtatgagcagtggctgcttgtctgacagagatttgcaggcatatcactgttccttgtggaaatctttgagctgtatactctagcattgttccctgctgctgccccaccttagtctatcccaagaagtctttgaggggttggagtggccataagctaattagataaagcaaaactgtcttgaaaattttagctttaaatttttgtgttttggcttataaaatacgctgttacagttatttgttttatagtttatctttaaatatgcatgagagcatttcacatcacaagcagcaggaggcagtattgtattcccagccagccaccaaggccagtattaacaacagtccttcctttctctcagatgtatgtaatgctccatcctgtgtccagtggagagtctttccacaaggcctgccggtgctggcacacaggctgcctgcctgcctgcaaggttttggagctggaactggccctcttaagacaattcctaaaggctaattaatttccttgtggaaaccacagtgaagctgggcctctagtttcttggccattcaagggctttgactttcatgagtcaaggtggtattacttgagatgcaataccagttgagggccagggaaggtcaccttaaatttaatttaagagctttttctcagagcctaatttggtccagccagagattgcaaaatgagagcctgtagacacaaaccatccctcagacacatttcagttggctcagatggaaaaaaaaatatacagaacatccaggaataccttgtctctaaaaagaaagtgtgcgtgtgtgtttgctttaaaatataaaaatttggagtttttacactgtgcatttctgacttgaagatgtgcatttgggtattcagggcccacactcccatggggaattaagtggtcaaaggctgagaagcaatcgttgctagggctccaaccccctaatttgctctcccagccttcagacttggttcgctgtgcagccattgacctggcagacttctgagtttgcagccttggccatgcatagttggttccactgtcctatgctctgttttctcttgctctcttctaactgtgtcttttggtttagatgcctcctgactaggctttgtccttctgggccgctgtctcaccttcccagttcctaaccctgttaactgttgtctgtttttgcctttcctccaatgccgattcctgttccttattccagtgtcatgtaagttattaacctctggttttcctctttctgagcttgccttacaagtaaatgcaggagagttggtttgagagtgctgcgttctcagtttagtcaggccttgcccttgctgatgtacaggctctccagtgcactgagtgtccctccctcagttataacagtaatgactaagtgtgttagttgagagaagagcaccagcacagctttgtgtgataactaagataaatatttccaagtattttcaggaaagacagagtctcagatggtagcaaggtttttcatggtgatttttggtttgtttgggtgttttgttttgttaaactgtccttgaattattttggtggcttactatctcttcttttgtgcgtcctcttagtggataaccaggccatgctgcactacatcagagacaaaaccgctgtcccgtacttctccaatttggtctggttcattgggagccatgtgatcgaacttgacaactgtgtgcagacagatgaggagtaagtagtgttccagccgtctcattggagaacagggtgctgaggatgtgtgtttccaccaagcaaaagtagagaggagagcagcacttgtgtctacgcaggcagtcaggactccaggctgcagaaggctctgcttccctgtttggggtggtgggaagttggaattttcccatgtgcctccgtatgggcactggagcaacactgcctctagctggggctgtgaggctgctgatcagaaaatgagggtgtgtgaatcaccaaaatgtagtgcatgggtgacttgttaaagcccttgcctcacaaacctaaggacctgagttctatccctggaaacgacatggaagtgcagggtccagtgattgaaaaggcaagtctctggagcttttcggccagctagtttacttggtaagttccagaccagtgagatactctgtctttcacaaaagacagcacacacaagcaccacacacaaacacatgcacatatactgtaccctctttccacacagaacacaaaatggccaaaatgggatctgtctatgcagtggagtagtacttagccatgactggtctgaagtgctgacacatgctctgataaacctctaaaacatggcctgagtgaggggcagacacaagcacctcacagcccgggatctcactgaaatgcccagaagggacagtctaaagacagagtagatgagaggtttcctagggcggggatacaggatgagggggtgtttctgggagcaggtcagaaagctgctgctgctgagtacagggcttttgacagacaagattgaaaatgttacaaagcagatgtgatgaacatacatggggcctcagagagcacttgctgaggccctaagttcaactgctagtactccaagaacaaaaatgtaagaaacccattacattatgtacatgaaatgaatgagttttatttatcagtgaatcgtatctcaagaaaacctttaaaacacgatttaagatggtggtggtgaccatgtcctcagagtgaggacttgaagttccacagtggctttttctgtcttgatactgtttgaccttctgaactgggcactttgctttgcagaatgttgagcagcctgcatggcctgcctcttgtattccatggctaataacacctttccaagtcaggacaactgaaaagcctcttgacattactttaccaccaactgagaacaaggctccaaggacaggctttgcctagccttgtaaaaagtatactgagatgggatcaggatactcgggggatccaaaaggaagtctcctggacaaggggagccaggcagcactgggaagaaatgaggctagggaaatggtgggattgggctgactggaccttctggaagataagggccatgtggatcacagctatcatggaaggaagtgaacccagcgtctcctgtggagctctgcagtgaccagttatgagagtgtcacctagttacccagtaagtactgtggggcagagttgtggcgaggagagtccaatgaacagcacctacaaaggctcagctgcagagtggggagcagtacaggttccacagagggcagagggactctcttcacagagggccagtgattaagccttcctcagctgggcctgctagctcaggcctggcgtcccagatcctcaggatgtgtcagcaagaagatcaaaagcccaagccctgtcttggctacagagtgggttccaggccaacagcctgggcaacttagtaagactgtctcaaaataaagtacaaagaaggctaggggaggagctctgttgtagaatatgtgccaaagccacatgaggctctaggcttagtccccagtttcacacacacattttttttttctctggattggggtagctgggtcggttatgacagatgctgttaaactcaccagagcacttcagtaaagtttttctgaaggaaacattaaaaagtgaggtatattaaaagcctattaaacttatttttatggtatcttaaaggagtagtatggaacattgtgtgtgtgtgtgtgtttctgggtctctggtaaggtgggatcatagattcttattatatttgggctttgcaaagcagatttctgattggtatcttgtaaaggtgtggaataaatgcaccaaattaggggaaagcaaatctgaacctctttcctgcctgatacatgttacttctagaaggatcttaaacacattttagattgtctagagggagagagtaaaacatgaaaatccagctgtcagatggtaggtcccaaatgtcaaaagtgggtgttcacaagtggtggccccattagaacactctctttgctctggcttttccaagtctcatgccttctgaaacatccatctataacttgggtagtagtaatcctgatgcaggtacagtgccctgctcccagctgattgctctttgcccactttctgcttttgaggtcgtgaactctgtttctggcttctttgactgtaccctgcaaacaggcagcatggttgttgcttgctgcagggtcacagatgcctccagcgagggcttgaggaagagtgtgtcttggttctgtgtcccgccatgtgggagccagagctttggagtaaggccttcttcgtgattccttacctctggagtacttggctcgctgggatttgtggctctgttagcactggtcataagggagctgaggaatcttaccatgttggccagtgactagactactattgtgcaatggcttcccacaatggcttcactgtttttctttgcttagcttaccctgacttgtttggagttgcagttgtagggtgcctgggccaaggccatcagggggaagagccccaagagttctaaaatgtttttcagtgtcctgtatattattcttttgtctgcccctgtcaggggcagtgtggataatcaagagactgtctacactagcttccctagtgtagattatctgcactagcttacactagcttggaggctggagtgaatgtgtctccacatgtgtcttgtgtttatgctgaaggccccaagccttggcctctggactgagaggaacatttctattgcaggcaccggaatcgggggaaactgagtgacctggtggctgagcacttggaccacctgcactatctcaacgacatcctgatcatcaactgcgagttcctcaatgacgtactcaccgaccacctgctcaacaggcttttcctgccgctctacgtgtactccctggagaaccccgacaaggtgagtctgcatcgagaccacggcctgcctcttgcctgtgtcttctgagagacagcctctgggagtgagggtggaagtagcagagcctcacaccccagggaaaggcctttcaaagctcactggccttctgttcttgatacgaacatgaccaagaaatgtaacatagctggtgtcagggaagtgtgatcccctcgaactcagcctctgtgctcctgtgcacccttctatgggtgtgctgtcccatagctttctctggtgctcactcaagctaattctcagagaattgccagtcagcatcagaactttcatatgaaatgcataggaagtgctggagcgtgctcagggaaaggtctcctgattacatacaagttgtcaccctgattcctccatggggtaggggatagtgacttcctgggaggccatctcatttcagggagttcacctagttgagcaggcttgggttaggacaggccatctatatgagtaacctgtttctaagtagtaccatgagtggctggttctggggtctctaggagaaaagctgcttcaggaagagaggcctcagttgtcccttcagagttaaggttagaggaagacagggcaagggaacacagatgtatccagcagaagctgtctccctgcaaggcacctcgttagatgcccccaaggcatggtgtctgtttggacctagaacataggcattcttccaactaataagtaaataaagcaaaggaagtcacagctccagctcacactggagcagctctggagagcatcactgagacctaggattggagtcatttctgcctttgtccttggacaaggcacaaaaacgcagggcctaaagatccctccctgacaggactgctctaacatgggcagtcgtgaagctgagtgcaaatcacagtttgttttgtgtttttgttttgttttgtttttgaggccagagggccccaagtcctaccttccccatgtaatgaagacctgtgtgcccagctggggaatgagcacggctgtaaccttggaagtgagcacacccattggatcagctgccaagacaggactgtgctgcagggttcttaggggaaggctggtctcagagcccagtggggaaggggatgcacttcctgtctgaactgaggacttgtggtcttctgtgttctgtttgccttttgtaaccagagccacctgtttcctctgtccttcactagggaggagaacggccaaaaatcagcctgcctgtgtccctctatcttctctcccaggtatgtttgttatgcatcccgtgtctcctacacaaatgtggtcctgtcccgtgtccagatgcttattacgtagttctgtggatcccgtcttgaaataaagtccaacacaagggaaactgctgctttccatacaccaagtagagtttagcctctcgggagaggatggaaactaaagggcagtgaggcctggcatcggtgctgttgatttctaggtgacacttcccagcagctggctcatgctcatactctctccatccctggagatgtgagtttgtgtggcctttgttcacaatgcttagaaatgagagaaatgtgctccaagtgctgggtgactgcacactcagagctgtgatctagcacacagccttgccatggctatatgcagaggggctgtggaggttctggttccagatcatcttctaagggatattaaagcagccacagcctgagatttgaatcttaagctagttagttgcctgtctccctccttaaacaactgtttcctccttcacatcttgtaactatgtaatatttataagaatgggaaaaactccatggtgacccagttgcataacttagaaatatttagaaatatttttattactagcagtccagattcgtgggccacttcacccagctgtcaaatagccagatgattgcttagagctctgtctccatgccttccatggtagcagggttgatctccttttagtgagatactcttctacttggatcccctgctgttttaagattggggtgatgctggctcctgctggcctgagaagaggttcagttaccatcttcccacagaggggaggttgattaaattcagacgtagcctgaccacttcttgcatcctggagccttattctagagactttgtttgctcagaactctgtctgaggtctgttctttctcaggcccctctgctacctcagtacaggacagcttctcctggcagacctttgtgcccattacaaacttgttacaaacctgccagcattgcctgctaggaattctgggagtctgttaggacccaaacaggtcaggaagctacaagtccaaccaagaaactctttgtcatgaccccgtcagctgttggagcatcactcgggtgggttttcctgaggagcgtggtcaccagctcctgtggctgcccctcagcctcttctctagagaaggacgtgtggctcaggcacctcatttcttcagtatgtctcaaaccacatagctttaattcattgttccttagtttcatagcccttaaaaagagctcttctatattaaaaatcttgggttagcaaaatgtctcagcatgtaaaagtcttgagggcaaggctgatgaaccaagttcgagacctagaacctacatggtagaagggaagaacctcctgcctgtgtctgttctnnnnnnnnnnnnnnnnnnnnggaagaacctcctgcctgtgtctgttctctgatatccacatgctcatggtggtactcacatgcccacatacatacacatagaattaaataaataagtgtagaacaaaatttaagttaaaattcttgagccctaactaggtgtagtactcctgtctttaattccagtatgcatgaggcaggtgcaggcaagaattcatggccagcctggtctacatagtgagtcccaggccagttaggactacagccttttgtgcccattacaaacttgttacaaacccgccagcattgcagtattggggggggggggggcttgaggccgtcctctgccacactgtcacttagtttaattatagtatagcctgatgtgtgaatacttaaagtctagtttaaatgctgtgcccttaaagcatctacatccctatacaattgatgcatatttacaaatagctttagcatagctaccatgaaaactcaccaatttagtgtgacaggtgatggcatcccctaaaagtaagctgcctctcttctcaagaacatggtgctgatggcctggccgagcacacttccgtatctctcttgtagagatcccacccaccatgctcctggcttagaaccaggaaaatgagcactgcatgcagtcacctacaaggatctgtttacctgcagggatccatctatttgcagagattgtccacaggcaagagtcagtacacaagcagagattggtttacaggtaaatatctgcacacagagatccatccactatcaggaatccaaccataggcagtgatctgtccatggacaagggtcaatccataggtagaaatctgtctgctaggatttgtacacttgcctgggatccaggtatatgatggatataactatgtactatgtctgttaacatccgttgcctttacattttgaaaatttatcattaatgtgtgtgtgcatgaagtacgagtcagtgcatgtagagatcagaggacaactttgtagagtcagttctcagctactgtgggttgtgggtattgaactcaggttgtcagacatactggctgaaccgtctcactgcccacctttacatttttaaacataccagtggtgtggacaggctagttaacaccctgattcctaaagccactcttctgaacatcaggcaggaaggtgagtgacaaccagggctttctgctctacatcccagactgactggacctacctctgactctggtggcttccacctgcaacactgctgtgaccccagtatggtaaaactcataacagggtttgggacaatttcagtgttggaatctcatcatgactgccccttccccagaccttgacggtcttatttatgatggaacctggcatgccacgggaaggcgcatgctggctgggccgtcctttcccacagtgttccacttgagcatcgatgatgtagatgcattcccaaggaagaacagctagccaaacaggcagcagggtggagaagaaaccctccagagttgaggggcagctttctccttaatgggatgggaatttgggtttggggaggaagagactggaggactgagctcttcaattcatatcctatttccgcctttcaccaggtcttcctcattatacatcacgccccgctggtgaactctctggctgaagtcattctgaatggtgatctatctgagacatacacaaagcctgcacaggatgttcccagaagttctgtaagtcactcaaggactgtctacattttgataaggagcagtatttgctttgctaattcatatttctctgaagtaagaaaaagaaaacaaacaaaaaactacaacatttttattatacattagtgaggatgtataaggtggtctgggatacagggaacctagccagtctttagatgtgcacctggggaaatgtagagtctagcatgagcagtggatttgatcaatccagtactgctgcatggattgtatagcctttggtccttagatgttatgtatactgtttctgagacataatgagagttgatagaacaacctgtctaaggcacatatatccacggaggttgggtagtgaccattagtgaatgccactggtccagtgtgagaacattagggtgtgccaacagagcaatctggacagcttttccttgtgcacagctgctgtcccacccagcctgaagtcagtctggggagtatggatgccatattctcaagtcatcttatgtttccatagaggtggaagttcttggctttcaggctaattactaaatattatgaactaaatatgtctagccatgttggattctgcagagattagaattgcactttgcacactaaggaagggaaacacccggggccaggactgtgacttcctggagtctctcctgcttatctcagtactttgatgctttgatgtcattcctcctgctattattctcctcaggtgtcctgagccccatgttgccttgggactttcccaacttgctctttccccccacatctcacctgtggccttactatacccaccactggaaaggccctcagagatctcatcctattgagttcctatcacatctgcacttgataggctgtgacatgagtccctgcctgagtgcagtgtgaccctgtacatggaaggcttctgtgtgtgcacacatgtgcaggagcctgtggaggccagaatagggtgttggatcccacagagctggaggtacaggtgattgtaagccacccaccatcagtgctgggaactgaaccctggtcctctgcaagagcatcaagtggttttgtttgtttgtttgtttgtttgtttttcccaattttttattaggtattttcttcatttacatttcaaatgctatcccaaaagccccctataccttcccccacccccctacccacccactcccaacttggccctggtgtttccctgtactgaggcatataaaatttgcaagaccaaggggcctctctttccaatgatggccaattaggccatcttctgctacataggcagctagagacacgagctctgggggtactggttagttcatattgttgttccacctatagggttgcagaccccttcagctccttgggtactttctttagctcctccagcatcaagtgttcttaatagctgagacatctctccagacctttcttaagtagcttcttaagtagcttttgctgaatagatgtagtaatgcactaccaactcagcacaggcagcagagcccagtcagaggtctagcccctactagctggatagcctagacaagttgttttatcccacttggaaatcaaggaaagtaagcaggttgcaggggctaagtaagcatagacagaaaatagatcccaagtgctaggcaagtgactagcagattgcagcttgaccctcaggcttgcttggtgtgtttttcaaagtggtcagaagaaagtcttctaagatgccaacattgaaatgtagagtttcacttatgagtacagagttttggagacaatctgatcgttatgcacatttctgcagaaagcctctcagaggctgctctcaggagacatgtttgttgtttattttgccttgtccccacttcacctgctgctaattgacacttcatttatattaataacagtttaaaatgtccttttgaactcttttgtttgacaccattttcaagccccagtgtagtaaccgaagctcttcccagaatgtcttccatgagcagtgctgaagtcggacttggggttggaagatctgagcccagagttttttggggaactggatttcacagatggcaagaacatttagcttgttagtgtgtgtgtgtgtgtgtgtgtgtgtgtgtgtgagcacattcaaatatacatgcatgtatatgcacgtgtatgtcaaggccagagattgatgtcatatttcttcctcagttgcttcttacttggtcttctttgagataggtctctcgatgaacctagaattcactgcttcagctaaattggctgattagtggcctctaaggaagtgtctttctctgcctctactctgctttcccagctctgggaatacagataaacaccatgatgcctgtttctaatatagtacttgggactcaaatttaagtccttgtgcatgcacggcaatcgtgtttctgatggatccatctcccagcctcttatcaagtgtttaaatgcataatgcattattgttgccagcaggccagtgtctcacagatctcttaaactcattcatcatgttctccatgtgatccagagccaccccaaaacggaaactgtattcctcttgaaccgttcctacttccctgtccctgcaggcactgtcccaccctctgcttctatgagtttgatgattttagatatctcatgtaacgaagtggaatcatgtaaggtatttcttttcttttattggtttactacatgtagaatggtgtcctcaaggtttacccattttgctattgccaaatttctttaaattgtaaaggcagaataatgtattatatgtatatacccactttcttttttaattttgcgtctcttcttgtcatatactgattatacattacagattcattatggcatttttgtacatgcatatgaaatattttatcatattcaatcccgttacactctcttgtcccatctcacgcctgatgatctgcttccctttccccactaattcccctgctgctttcatttccttttttatttttcccaatgaccagggaatttcagtagggctctatacaggagcatgtgggtcctcccaccctcgaggatcatcggcccatacaatccacagggcaaagggagcagagatgatggggttggggatctggaagccctgtgagtccgtacagtgagtgactacgctggaaccaccctcggggcagatcaacattacttagggtgattgaaggcttataaagtgttaggggggctgagggtagggacatgcaggatgggcggaggtgattggctggggggcttagggtaccctaagcatggggaagcatttcagggatctcaggtgttggctgaacaggttttgtcaaaacctgtaaccaaactaaggctacctaacattcctcagagagagggttttggattttccagacaaggttagaaaaggagaagatccactaatgaagtgagtctcccatattctgctgatcccagaggctctctagtcatggtggacttcatcattaattagcagagttttcccacaagagcatgggcaccttaccagtagctacacaactaaagaaaatgtttctctgtttcccagaaactattactgccaataagtcctcacagaagacagagcagagcctgcacctctcctcccaactaccattaactgacagacaatatgtcatcaggaggggtgcggcctcgtgagctccctgacttcatgacacaacattggtaggtcaggtcttatgcacgtcatcacagcaattatgagctcagagtgcagcagccccatcatgcttgggacacagttttccacagcactccactccatcctctagctcttacatttcccaccttctccatgatgttccttgaagtttgaaggaggaggatgtgagtgtcccattctgactaagcattcagcaatcattcacgtctacccattttctttattacttcatctgctagcttgcagacttctaaaggacattttttagtgaggtaattgtagatttgcatgcagctgtaagaaataacacagagattgtccctggttttatcccatgtggatgcctacagaactacagtacctgaccacaagtaggacacaacaaacaggctgtggtttgcagcttaagcaaaagcacagagcagatggcaactggccacctctcagatggctctcaggaggtctgtcctttttccccatggtctcctcttggggcagaggtccagcctccactgtgggagacacacccactggttgcatgagtggctgaacagaaggagctggcacttgagaggctggtttctctgtaggtgttagatcaaagccccaccttctgatgcctgtagatggaaatcctagactagctgccaaggtaactggcagttgtgaattgtttaacagtagtcctgtgcaagttgcctgccttccctctgagtgacaacagtctcctactatttcctgcctggctcggatgtggttgatcaaacttgttttaacttcttggtcttttttaccctactttctccttcctgtaatttgtagataagttactggtattgcttcatttttaccagcagacctcttgcaaacccaaaccaaaattggagagaagcagaggagagacagaattatactgaagggctataatttagggttaaatttaacacagatcagaataggcagataaatgtctaattgaaattcctgtgtgcattaccatcatatggtaggcaggcaggcatgacgctggagcaggagctgagagcttacatcttatctacaagttggaggcctggtgtgggctttgaagcacagtgcacacctccagcaagaccacaccagctaatttcttcctaaatcattcaactgggaactaaacattcaaaactataagacagtgggggcattctcattcggactaccacacatacccaagagtggcaactcatatggtagcctcttctattgtttgcaaagtgattatgggttggaactggggatgtgcttcggtacctgtaggtgtttttttaggttaccgaaagacggagtaacaccagaaatggagtccaggctgatgtttaacttactgtatcgcatggggtagttggtcttaggtttatcatctttctgctttaccctcatgagttcaagggtactcagtgctggaataaatgaggcagcaaggccagggacagcagtcatgaggtgcttgtgactttgttgtgaagactctcagcatgctgtttcttgtgctgttcacatgttacactctgcatctggtacctgcagcagtgagtgcctcaaggtgtcccaggttgagttagtctgcgtctccaggcctcagtcttattgcttctacagctagaataacaaacatggctttgaagggagggcttctgctatgtgtagtgtttgttcttaggtctagcaccagttggtgcaggaatgttaggtgaggctgtacaacctcatcccctatatggggcctatataagtgtgcgtgggtgggcacgctgttgttggaactgaactatattcagcaggcgcttggggaagcacttcagatgcaggcaagggcataaagagggcaggaagcatcagcaataacaagtgacagagactgctaagactagagtagacattgccattggtgacagtgagctaaaccctcagcttgcactctgctttccaacttaaccaccaggtttcacctctaggtggtgcaaatattttatcactcatatgtgtgccaggactggctggctgggagttcagaatatcagctaagagacagaatagctttttccctccgaattagtcattgactatatctgtaggtgtcaggtgagccagttgggaaggtacccaaatggttctctggggagtgcatgtgcatctgtatgttacttacacttctctttatggctcctgccattcctctgcttagcagaaaaccctaccaggataagatgtatacagtcatcatctgagaccacaggagcctggcttctttgggtcatgtgtttgctggctcagagtgtcagagaccatctcggggacccttggctctgtcacagggctgctctgggatttgggtgtcctgctgaatgccttggtaggagtttatcttccagctgggatgggagctccaaggcacacgtgttttagtgagagggctgtgaataccaaaaggagcaaacagacctgtagagtcaagggccatcactaactcagtcacatgcattctcacaagagaatgggtctcagaatagtcttttctatgcagccactgtggaatctcagctcctggacatcctgtaagaagaggatctgagtgctgaaggaaatgctggagtgttctcatgccccatacgtcaagaaagacagcattgcattagctttagggactcaccctgggcataagttgggcttggtagctaaaaggaatcctgttgtattgagactctagacaggaagtctctaccaaggctgaaggtatcttggactaaagaccaggaccctgttcctggtccaacagggatagacccccccccaagacactcatcacttctggtatgtgtatgctgtgccttttctggattttgttaccagagtggcctctctgggtgcttgcagttcttaacaagatgtttgagttactctagtgtggttcaatgtatttatcatttttttcagaaagtaactgtaggtgtctcctctgtgtcaggcgtcattctaggcactggagatagaccagtaaatctaagaccctgcctcataggaagagagagaaatagtgctaactatagtaaccgtcacagcaaagacaccagaggcttggctctaggaaagcagcagcaaagtggagacaggacaagtcacaacagcgtgttcacagtggtaggaaggtgatgtgcgaacctagacttcaaggataaaagggagggaaccatggagttacctggaggaagaacattgtggtcaaaatgagtagctcgtgtaaaggccccaagatatgacatgtctggagctgaagcatggcatggtgaggtgtgggaagtagagaggagactgtcgggggcacatggagccttctggaccactggaggactccaatgctgatacagaggaacatgaggttggtgtgttcccagtggctggcatggttcctgaaatgaagtggctttgctattttgtgggttctttttcccattctttatctccccagtttcacctcctatcagtagatagaagagaaagaaggatagaggggagggagagagatagagatcctcaaatcttctttctatcttgtttcttctttgagcactactaacaaaccataaccaacactgctgaacgaccgccaaccaccaaccctgcctttcaggtccctcgcatttatataccctatgaaaagttaccagaatcccaaatgccacacaattgcagaaactatctgcagctggcaaaaccacacctttgctacagcacagggcaaaccatagtcagctgctacaaagcagccccctatcccacacctgggattaaaatgaaaacatattctaataatatttctgtggtttttttttttttaagaaactaaaatttcagaattctcactacagtgaagtgtattgaaataacagctcccaaggaaggaatcagatacctcatcggtaacaagccacagaaatcttctttgtcagtaccagaattcttaaatgaagaaacttcttgctcttgtttggatgtttcacctgttgggccatggacaaccactggtgagagtgctcactgtgtccatcctagagacaccggcccttggacactctacactctggtggttgtggtgtcagacaagcatcattcatcatgcctgaggggagtgagctctcctgggaggcggattgaaccactttctagaacattctgatgacacatgattagcagatcctgacaggcctggctgctgaccacttactgggctctcaacacctcaccctggaaggccttccttgtatccagaaaacaaattttgaaacgtcactgatgagaagatgattttaatgatctacagttccttgctttcagctttggatgagaaaatttactaaatatataccacacagaatcaacagaatcaacagcaagaagggtcagatgacagcaaacatcatccagtcgggggctgtatacaatatgcagcacagtagcctaactgtgagggcgaacaaaagcaacatcaaattaaggctttaagagtactcagcagaaatggactagtgtggcctcattgaggtagccagcagtggttttccagggagagttctgggtggagcaggcatcccctcaggcaaggcttccaagtaaaagagaaataacagcaagacagttatcatctaattgggagtgtacagttgtccagcagaagtgtctgggaaggcttgctgaagcaggctagagtttccaattgagacttccaggagcattcatgaaggagccctagcttcctgtttcttcagtagacatttttatatcatgggataagcaacagtaaccgtgattggaaatagttggccttttcagctgttttcaagggcacgatattcttactcttgggctgtttattgtcctgccctatccctgatacagagaaaagaggccagctcatcccagacaaggggttttggaggacacttgaaataagcattctagagtctgggtcaggagagccctccacactcccagagctcgctttcatcagacttaaaccccgttaacaattcaccaacataatgtagaaggaaaaggtcacattaaactgcatttcctgggattggtaatgcaagcctacagtctcacttctagctgctgaggcaggaggatcaagacctcaaggcctgactgggctgcagagtgagtccttgtctcaaaataaaaagcaaagaggacaggggagatagagccatggtaagctttattctcccaaatgattgaaaggctggagagttatgactgagatcatgacttggattcgccctactgcaagcagggcccagcctgctgaccatggacagctatggctcgtgatgcttagtgcccactttgagcatttactgagtacttacacattataggcaggcagctgctatgctggccttggagaacccagaatgaataagaatgaataagacacgtgtccccatcctaactctctgggatgagggtcagacagcgaatgaacacacactcgtagatatgagacctgtgtctgaaggacgggagacagtttcaggaggatcagccttggaggtagccttgggcctgcaaactgaggtcagggaatggagtcttcaaggaactggtggctagggacggggaggctgggctgtggagccagcagaggggctgtttttagcttcataaaaggcatggcatctcttgtctcatgcttcttttctagagatcaaaacagtgctatgccccagtctccccacaaggaagtctagggtcctagaggttgagtgtttgtccctctaggattgctagtgttgagcctgaacccattacagcttcatcatgaacttaaagcgccttccctaaagaaatgccaatcagctgcttagcatgtcattctttaatgagggatgtcagatctttccttgcattgattgaagaagctggcttgaaattcactaatcttatagacatttatttgctctttttttgaatgccagagacagttgctggcagggcgctagagctaggctggcaatgggaggagagaatggccttgggtgaagagaacaaaagatgatgctagttccctgtagccctgaccacaggtcctaggctacttcccagaaagtactatcatgatgtcacatgctgcctgtctgaaagcccaggtgctatgctaagcatggaccctggagtctctgagctctacaagtcctctctggttccaggagagtggtgtttcagcaagttcaatccttgcaccttcagtgctgcacccccactgttaacagacatagcctccattaaacaagtcacacatgctgggagcatgactaggtttaggttcattagctcatgctgccctacttcttggcatggcacattggcacatgtgtgcccatcatcaccccagtgtgtatgccatgtaatgtttgcttgttgaacaccttcttttggaatgagaatagtcttgccatggcctgtgggaagtcaggtgctgtggtgcctttggttatagaaggtgcaaacataggtcactgtgagttttagtctttgtatatattagatccaaatgcaaaataaggactagaatgttgttagcccaatgatcaagcacttgtgtggtgtgtatgagaccctaaattcaatcccagctctactaaaagacctaaaaacaaataaaactcataagcttttggtctacatagtacttgcttttcctgttggtcagatgtatacttgacttacactatttattggcttgtagaccaggtctctccaagtagcctacaccggccttgaactagtcctcctacctcagcctcccatgtgctgggattataagtatgcaccaccacacacagattatggctcagttttcccctcagtgcttctagaggccggcctgttgggtagcacagcaagtgctatggaaaggagcagtggtctgctggacactggattccattctagctccccgttacagtgtgagggggctagaggcaagctcctgcacaaatgtgcaagatcctcctagcagtgtgaggctctcaagtgctcactagtatcaggggaaaaggactcccaggaaagaccgacagaggtggctgtctctgtacttctcagcagccctcagggagaagctgataggatgcccttgggatgatggggaagttgaagcctacaagggggatagtggtcagcagtagccatggcttggcacttgccagggaggtggacctgaacatgtggttccctactggctttgagttctaggtcctgtctatcctggcctgaagtgggggtgttttgcaggtcagttagtagctcagtaagtgtattacccgttgagccatgtcacaagtctggacttcagtctttgtcatctatgtggactcccactgcagccatggctgaccagagtttcataacccttcctcacccatgggccttctctacatgtttccagctagtgctaaatgattatagtcttagagacataaattcccattctctgtaccttacctccacccagtacctggctagacagaaaagtaaatttccttggaaagttcttaaattcttttttctttctttttttctttgtagagacagggtctgatcatatagttctggctggcttggaactcactatgtagtcaggggtagccttgaactaatagagatctctctgcctctaccttctgagtgctgggattaaaggtgtgcagcattacacccatctgaattcatcctttaaaaaaccaaacaaacaaacaaacaaaaaaacttgttttgttttattgtggggaattttccaccgtgagccccgctcccctatgcatgaattcctgcagctgattttcctctccgtgtttcctttgtggctgggaagagaagggcggctgctgcactgtgtgaactgctggtccctctgcaggggcttctctccgcctgcctttctccctttcttccttccctcccttccttctaccctccctccctccctccctttcttccttcctttctctcttcccctcccccatggtgagctagccaagagcactcaagtagctattgggcaagggttctaccaccgaactaccggtccaaatcaggaggaattgtatatatccatgatttcatttggttttagaaggccagaacttctctgcatgcatttcaggcaaaaagatgaagcagttgtactggccttcagactgctggcaaccccaggcccttctgctactttcctttcttttgctagttattgtgactattaaagccattttgaatttagggaagacttgtcacagccctccatgtggatctctgtccttaacttctagtacacaggtgtttggtgtgtgttcagtttcattgtctgcacctgtgtctggtagtcctctcactgtgtggcatgctctaaaactcactgcagataggtgttgatgagtggaagcaagacacttcatcgtgggatcatctccaggagagtgcaagcccagagctgcacctgatgactgcatcctgcttgggctctgatggatgccgtctgtcaagctgtacatgctcagactgcccaatctccaactctgcaatatattatcttggtttcctggatagtagaatcatatttcaatttatctgtcctttttgtggttgaataatccaaaatgggcaaataaaaatgaatgtttggatttggatgctaatttagctctcaaatgggttttgtttcagacattattgaaattaatttgttttccttgagctcactccacttattggcaaggtacagtgtccctccccctccagaatatacttggtggctcttgggataaatttgtaagatagataatccataccaagataatggaaaagtttattctaaatcttcctttaaataacaaattgatgtttgaacatttagagtctggaaagataaacatttcaatcaaaattctgacccagacaaatccattttcttttgtcttttctcattttttagatgaatttgtttgcatggatatactactttttccctctgagatagaatcttgttctacccaggctggctttaagttgcctcgttcaagtgattttcatgcctcagtctccccaggtgtgtaccccatgtgttgagcaccattcatatgccccattcctctaccgttcattcctgagagtctcttgtggagaccaggctggccttgaacttggattgtggctgagaataacttgaacttttggtccttctgcctctatctctcaagtgctggcaattactacatgtgccaccatctccagattatacttttttctttttaagaactctaagtgtaaagccaaggcggcttccaagtagggcattgctgtttgtcaaagcattggggctttggtgctgacagcgtctgcagttccacaacctcggcaagtgaacagattcgacccttcaagctttggttttctcacctgtaaaatgaatctgtaatttctgcatatcatggttataaggagtttatgggagtataggacatgagcactggtgcctggggcctttcttgttctctgagacctctggttccctagagaaaattttttcttgggagctgatttggctttggctcatgctgactgtcttagttagggtttcattgctgttaagagacaccatgaccaaggcaagtcttataaaggacaacatttaatggggccggcatacagtttcagaggttcggtccattatcatcatggtgggaagcatggcaacatgcaggcagacatggtgctggaggagctgagagttctacatcttgatctaaaggcagccaggagactggcttccacagggaggctctcattccacactgggtgaagccttaacatcagagtcctcaaagcccacctacacagtggcaaacttccttcaaaaaggccacacctcctaatagtgccacttcccgtgggccaagcttattcaaacctccacactgccacttagcaagtcccctacagggagagctggtgcatgaccacatcttctgggccctttgcctttctgtctagcacttgcttttttattagcaaggcatgctgctattgtggctcctcagccatgtagtattttactgactgtaagtaaaagttaataagatggccataatgatacaagcccacaatcctattgcttagggaggcagagacagaaagggccatttgaaacctgtctcaattcctcccccctcaaaaaatataataacaataccagtttactgttgctatgacttctactttgcagggagtgtatagatttgaggctctgctgcctcctgacttggtgaccttgggcagctcattctttccttctaaactgcttcctcctctgtataaggaggatgactgtgctcttggggttgctggagactttgggtgagatgctacactctgagctctcaggcatagacagagcacagcagaagttttgccatgttgacaagctgatgtttagagtgcacagagctggcatgggaaaaggcagcatgttttgtgtacatgtgtacatgcatgttctcaagtgtgggactgaggagaggacctagggcttcatccacaccaggcaagtgttctaccatcagctgcatgtcaggccttcctttcttcctgagatagaatctcactaaggtgttcagattgttctggaactcactctgtagctcaagccgaccttgaatttgagatcattttgtctctgcctctcaagtagcctgagttacaggccttcaccaccaggcctagaatagcaagccataaatggtagttaatgttttagccagttactagtgatatggaaagtgttggtaatagtcctgctaccaactcaggagtagtgttagttgttttagaagtaacttgctaaggcaggccctctggcagctcgtggcatccattgagattctagcatcctgattcattcattgcttttcttgaactcacataggccaagcccagcatccggtgcttcattaagcccactgagacactcgagcggtcccttgagatgaacaagcacaagggcaagaagcggatgcaaaagagacccaactacaaaaacgttggggaggaggaggacgaggagagagggtctgctgaagatgcccaggaagacgctgagaagactaaaggtacagagggtggttcaaaaagcatgaagacaagtggggagcgtgaaggtgagtgtacccgggaacggacggccccttcacccacgccagccctgcagccagtgaggctctgtgtcctgttcttctcctgctccttgtgtgtcccctgggtgcttctgctcatctcagcacccaccagtgtacctcattctggacagcccaagcattcagaggcagtgtgggctgtgtaatagcagattcagtgcaagtcccacctgtgtgacctggagtaaagtctcctatctgtaaaaagctagtcacacatcatagccaccatatactgcattaccagaattaaatcacacagtcacctggccatctcacaacagctccaggcccttaggaaatgtggtggcacttgctgccgccactgctgccgctattgtttattgttaacatctccattcaccattatggctgctgttcctattcctgctaacttgagggtaggatttgtgttcagtatactgtgggaaggaaagggcccaggtttgttaagacagtatgtctttgatagctgatggatttttgcagtcactcgattaaatacagactcccttcaggttctgtagctgggttttacaggtcccatctgttcagagtgaggcgcaattgtgtggtgtgtatgcgctcagtgaacagaaacctgccttctttcaccctggcaggattatccgccttcctcacctctccctgtcttgtgtagatgctacaaccctctggagaacatttggtctggagttaaacactgcaggtagtcagttgcttgtatcagagaccaggctctttccactcagagccccgagctgaagcttgggtgttggcgataatgggactcttgcttggtgtgctgggtcagagcttactggctggaaggaagatcccacacctccttggacaaatgcaacctctttggagcatcccagctaagagtagtccagccttatgggccctgagcttaagcactgcagtcctaagtggctgacagagccatgcagagctttgcacgttgactagagcagtggttcttaaccttcccaatgctgcaaccctttaatacagttcctcatgctgtgctgaccccagccataacgttattgtcattgctacttcaaaactgtaattgtgctacttgctatgaatcactatgtaaataactgtgtgtcttaggtgacccctgtgaaaggatcatttgaccctcaaaggggtcataacccacatgttgagaaccgctgaactagaggcttgtttgcttttgagagctgtgtacaggtctacagccagcacataccctgtcatcccagcctgttggtccctggaatgactatcatggcaattgtcagtgaacaccacaatcacatgtcagtgagtctagccaaatgtctcctggtggcctactcttcttaaggctgagtaggtctctagcctgcttttatttgtatacattgtgctttttggtttagttggtacattcaattcatttgtggtctggaagcctttgcttctaagtatcagtttggcagtaaggttaagggataaacatgaggtaagtcacactcgcttattttccattgtgttaaggatttcactagctgggaagaaggtctagccatggtgtagtggcatggggcaggatgggtatctgtatcttgttttgcacaaggtgttctagtcaaaccatcttggaaagatgttgctgcttttgttccaggctttgagagatgcttttaggcagccacagctatgactaacgtggtatggacagggcaggcttggccccagaccctaaccttattgtcagccagatagctcagtcccagcacaaaggggctataggccagcttattgaggctgttatatcacttagggtgctgggcgtggagtgtggcttctggtgctgagacctgcccctgcacagggaggacactgttacccatctcccaacgtggggctcccaagctacacagattgtgccaaataggaccctagggtttccccagaggctagcttatagacttcatagctcatccaggtgtggctcccagtgcccctgtggccattttgctgccttgtcagttctcaaacacactaatcattcccaaacatggtggattgtcatcttcccacccagctcaccataaacacatagcatccacaggccttgctagtctacttctattctaaggcttcccaaaatatatatgccatcttttagacttatatttgaaggtgctgataatgaatgttttctcctcaccctgcatctctgtttgggcaaaagtgacagctgtgaaatcctgacccttggtgtcagttcttattgcaaaccaggatttgttcctatggagttgggtcatggggcaacggcagctttttcctaagctctgaagtatgtgtatcagcagcagggatgagagtgtggggtgctgggccccagctttcccctctccttgctgtgctgaggtggcgggtgcttgcttcttcctcctgtcactcctcctccaagcttcttttattgggcctgcatcagggggtgattaacagtgtgcttgtgacagacacatgtgcccctgcaccccccccccatgtctgctgcccctattctggtggcaaagaagtctccacatagaaaggtagggtaaaacagaagagtgaaaggggtatctcagtgggacggtttgccacagcttgatgggaatgtagaatgattggagttttgttttcttttgttctgtttttataaagtagctcccagaatttgcacttccatatttaggcccagacactgaagcacactgaatgtgtgcttttgacccatcttcactcatctccagcttacaaagaaatttgctgtccctcagttctcaagtcctgggtgacttgttccaaggctacaagattacagtctccaatttctgcagaaatggtctgttaaaagaaagacaaaggatgccttcgcccctcagctgaagaagctctgcctaagaagtcagacagccaccacatgtgcttgtttcttagctggcccttatttgaagggacatccatctgcttttggacttgcttagagcagtaagttaataatgaggccagcagaaagatggaatagccctaccacctcctgggaacagcagggctaggctgctggttttgcctaaggaacaactaggaattagttggctaacccaaccttcccagctcccttcctggaatcccacatgggcctgtcgtagtggcagaaggcaagactgacagcctagtcggttggatagaggggtctccggggccttgatctgctttgtcctttagaagtctctgtaagaatgaagtggaacctggcctcactcttgactttctctgggatattgaaacatgaatcctagtttttgtcttgagccacattgtagtttcgggtaagttgaaattctacagcacacgtccacctatagagggtctttctgattctcagcctgaggctgttacagtaaaatttcccatgtgacatgggaaagattctgcttgtgacacattagcagcccagatcatgatggaaggcagtaaaatgggaaagattctgcttgtgacacattagcagcccagatcatgatggaaggcagaggcatagagatacactctgggcctataccatcaacagtttctctagacctttcttcctttctctgttcctggtatgtatctgtgttcgtgtctgagcatatagaccacaacacacatgttgagactgttgagatcagaggacaaggttagtgtctgtccttaccctccactctgtgagacaggctttcatgttttgccgctgtgtataccaggcaggctggattgctgggggttctcctgcccctgccttatttcgtgatgggagcatggggatgtgagctggcagtgttaagggtgcctgtcttgtgtatctatcactgtctccagaactctttgcatcttgcaaaactgagggattcaaactctggtccccacacttgcatgacaactgttttacctatgagccatctccccagcccagcagggttcattttcagagtgtaagcatgtgggccaatgagaaagagacttggtagctcccctcccttccccccattatgtagtggggagatttttgcctgtgcctttcatacagacttaacaagagaagcatagagctcagggagggcaaatcctctaaaagccgtatgcccagaaaaatcactgtgttcaggagaggtaccaatgagcaaagaaggggacatactccagccagcccctgctattgccctagccaatttcaccttaaaacactgttccagagtcagccaatcacagccctctgtggttacctaggtaactggcagcatatctttccccttcccttgaccttcctatgaaggcctgcctttctccctccctctctattgtctgtctgtttgtggtttctggaacagagaatccagattgaagaaatccttgaattgtgaagtcaaagacttctgggatgtggtgcctgccgtttccccagagagcacttcatctaccagatatgactcctcctaggcgagtcagggagttagtactatcagaggatgggggaattccaggatatggccagagttgtcacatcaagaaatcaatgtctttgtgtcctgaccttctcggttctcccagtactgtcatcacttatgtggtatgtagaagatgaagatgcccttgcctgcttttggttcctgtctgtcttttctcttcctacttcatccttctcctcttcttcttttatttcttttttattgtggtaagattctggcaaatgaaccctcactactttgaagcatacgagtcagcagtgctaagggttccatcttgtgtgtccattgccatcatttccagaactctttggtatcctgagactctacctgtgaaacaactctcattctccctgcccccacccactgcagccatcattctctgcctgttgtcatggcacagctgctcttctgtacagatccttataagatcctacaggagctgaggacatagcccaggcggtaacaggcttgctcagcttaacctccagaagccctgtattttattttattttattttattttttattttattttataaaatggcacacttgtaactccagcaccaaagagagagagagagaaagggagagagagagagaacctgaggagaaccaacactcggggttgtcctctggtatatgcacttgagtcacacacacatacacacacacacacacacacacacacacacacacacacacagaggatagttactcctccataactgtgacaaagtaccatgaaggccttatttgtgtttatggttccagaaggttaagagtgctctgagggtctcacattgtgattcacggtaagaggccaaaagcgctaacttttgaaatctcaaagcccagccccaatgatagacttcctccaaaaggccacttcatctcaacctacccaaacagccaaactaggaagatttaaactaccttttgttaagtgtggggagatttcattataaattcaaataaaagtaattaataaatacctaaaatgaagagataaacaatgaatttggattaagccagagccacattatgaagtaggaatgggactagaaaaccctgttcaacccctgtttagttaggccaccccagctgtatactccgatttagtgctacgggcaaggcacccagagctgcacccagagctgcagtagatttcatgggaagttacagcttcccaggctggaataaagctagaagaagaaagatacaacagttcttgaagatgattctcctgagtggcaggagtaagtcactctcagcatcccagtctttataatagttctaactaaaggctaggtttatttcagaagtcattgtgtcaaacaatcagataaagtgtttagtgtgaacttctaaaataatttgaatagattttttttctaggaggacagtaacattatataatagtgctaaatttccctgtcctaaaattaactctcaaaattattactgatatacctttgtttttaaattttatttttatgtgtatccctttgtgtctcggtggaggttgtgctcccgagtgcagatgtcagtggaggagagaagagggtgtcagatccctggagctggagtccagcacttgtgagccaccccctgtcagaattgggaactagactcaggtcttctgcaagagcagtatgagcgtctaactgctgttttctttttaaagaacaggttgaggattctttttcaaaatgctttgggctaccatcttttcagattttgaaataaacattccatatactaagaataatgagttgttgtcttggggatgggactcaagtgtaaatgtgaaattcacttatttttcatatattctttgtacacagagccttaagatttttctgatttcttcatttgtttatgtagaaggtgggtgtggggaactagtgcatgtgtgtatgtatgtagaagtcagagcacaactatacagtgggtttttaggcttatgtggcaggtgcctaacctgatgagccatctcaccagcccctgactgtaaaccatgctgtgcataatgctcttaacagaaaccactttaaggtttagatttgggaatgacttgaattttgcattgttggattaaaggttgtggtagagcacattagaaacttgatacatctttaacttttaatttttccattaattattttgtaacaaacaaaaccaactctatttcttaagggttcttaggctaaaattctaaaaataatatttagttcccatccaacttctaatttatttattttgttgagcgtttgttgccaggtgactccaggatatacccagggccttgtatgcatgggcaaatgcccaccctgatgtatgccttcatgctcctagcagagctgtggactcttagatatatttgttttgatgatgatcataggaacatagagttcattgtagtgttcttctacaccagtgaaccgtgtactcattcaccctttctctgggcatctagaccagtaaagggaccctgtgaacaggtttctgcttatatctgttagggcttacgggaatgccatggctggcaggctggcaggctggcaggctggcaggagcagcttctttccatttcaccatcccctcgttccatgtctcttcctttggctcaaatttcttttttctctttcctgtcttcattggcagctgctttctctgtacagttggggatttctgaaagcagtttgctgcagatgggctctgccgttcttcacttgccagtggcaatacttgtctcatctctccaccaagtaaatcttggttattgtcctggtgtacttttgtgcattctttaccccaaacacaggcagatgtgtcagctacaacctcctgggaggttttcttactgtgtagtaagctttacagcctcactgcacttgaagtgccccaccccaccaggtggcctagtgttcagagctacagaacaatctcactgtttctaaaggtggcctgagagaccaggaggcagagtcccaggatttggggatctctcacaaggccctcactgtcagatgatggcttacagtgtcggagatggtggcagtggctgtgcaagctgaccttgtgtgcaaggccttcaggacatctcaggcacttactgagttcccttttaaaatgcacattaatagatctccttgttcatcatgtatatctttacagagactttgcatttaacactggttttgagtttatagtagtgtcttagttagggctttactgctgtgaacaaacaccaggaccaaggcaagtcttataaaaaacaacatttaattggggctggcttacaggttcagaggttcagtcccttatcatcaaggtgggagcatggcagtaactaggcaggcatggcgcaggcagagctgagagttctacatcttcatccaaaggctgctagtggaagaactgacttccaggcaactagggtgaggatcttatacccacacccacagtgacacacccattccaaccagatcacacctattccaataaggcacaccttcagatggtgccactccctggtccaaggatatacaaaccatcacaagtagtaatttttcagatgtgttatttataaataatttcaaatttaagaaaagtcgtgaaacaaaaatagtatagactactcatttactctttacttagtttccgattttgctgttttctactatttgcatttttacttgtattctccccacccgccccttcctcccaccctcttgcccagttcacacaaacaaacacacatgcacacacacgcacacatgcatacacacacatacacacatgcatgcacacacacttatgcacagttgttggagggataagtcatatctcatgtccttttcctcccagggcctccatggttttttgctaagaacaaggtattcttcaacctgtcaccatcagttcatagctcttttgtcgacagattttttttttagctattttattggattcttatatttactcccacccaacccttattccaccctaatcccttccaaccccccaacactaggtaggagagaaagaaggctagaggggaaagggggcatagacttctttagactacttcctactgattaggggtgttgggatcctagggccaagtccaatcttgtcttcagaatgtccagaaagctagcaatccagcaaatgcaacagcagggaccagcagcagctgccccaggctctccaaggctctcccatttataccctctctagaatcccatatctgcagctggcaaaaatcatggcccacctagagtgtaatacaatcatacttaatggccgtggacaacctgaagcagccccatatcccacagctgggattaaaaccaaaacatgttcacatagcgtaactgagttcttaatgaaaccaaaatgctcactacactctttcccagctatgtcaccgttgtctctgttggcctaaaaaaatgtcctttattgcacattctaaattcctacttcctttttttgagacagaattttataggtgtagcacgggatagctgcagattcttggtcttcctgcacaggtctcctgtattgacaccatgatgatgggcgcccttcatcacactgatcttttgaagaatgcagatgtgcttcgacctctagtgacttaagtggtcctcatttggtctctgaatgcttaagggtctgccttcttggctgatgtgggttaggtggtaccatgtccttttaagtgtgaagtttgtactgactctcagtcccagtattcccacattcttggcttccctgttatgttttgtctgtagtgaactcctctgtcttctctccaacacagttattctctgaggctgtaacaagccggaacagcgtcagagtcacatcgctcaattatgtagcattctgtaaataattagtggggagtttgtttgcaatacttctccatctgccaccctacctcagtatttcatgtgtccaaagtcaagggagtcttgtcagctgctccttcgtatgcttgctggattggcccacccccatttcctccttcagggtaggtgtggcacttactttaaattttgacatttccctttctgtgcagttcagtgttcttgttgatacaattcatatgtatgttttatgatttaatacatatgtcctgtgtgtcctggtcacatccaacccaagcccacatacacagaatcttcttcttaaaatacacagtgttctaaccccgaagactgtgcagacaggaaagtcctttgcttctgtgttccttctcccctcccacccctgacctttttgctgagttatctgctctccctcctctcccccatgtgtgttgtaaaaatacgcagatttagccaggtgtggtggcgcacacctgcagtcccaatactggagaggctgaagcaggaggagctcggccggtctggactacatagtgaacctctgtcaaaaaaaaaaaaaggaaggaaggaagaaaaaaagtcaaatttgtatttttttttttgtcctttttgctcataaggcagtgtggtagatgtactcttgacacttttctctgttgttgaggttctagaaggataaaaatccattgctatcacagaggggacatgtcacaggaacagctgaaaggtcatatcttgaaccccaagcagagagtgaattaggagttgcacctggcttttaaaaccccaatgcctgtccccagcggtatacttccccagtaagaccatcctgcctacccccccactcccgcaaacagtgccgctgactggggaccatggaggggcagtttatactcaaccgcccacaagtcctgtacagcctcagtacctagtaaaagctgccggcctccaaggaccttatcaggttagatgaaggcacaacatttttacatgagcccatcagggctgcaaagctagttcagcaggtaaaggtgcttgttgcataagcctggggacatgagttcaaatccccaatagtcaagcaaaaggccagatctgcttttgcgagtgcctgtaattctactgctgcgggggcacagacaggaggatccatagggatcactggttgctctgtaataagagactgttagtaagtcacactcaggtaatttaggtggaaaatgatagagcatgacaccccgtgtcctcttcttcactctgcacatgctcacagtcatacatactctcccccatacacacaatttacattttttaaaagtgctaatcccttcaacaagccattctcatttaaacagaagcctggctggtgggactggggatgactcaaagtataattgagggtcagatagagcccttgagttgccattagcagaatctctggccatttggtagctcctgagtcactggagcatcctgcttggcccattggtggaagctggctgccctggaatgaatacagcatcagcaagaacaggtcagcatggggccggaaggcaacacaagaccaccatagacactctggtatggcagaaagaggggttcacaggaaaggtcacaggctcttagagatgtgacagactggggagaccctttccccaaagccacttctctccatttcaaaagagacagagagctggtggagcccaggtaagaactttcactgtaaaacttagctggataaaattgtttacaaaaagatgaaaacctatcctgactttgaaagaactggtctacactcacctaggaaatcagctgaaactggagaaactcagtaggattggctgagcaactgggagcacagggtgacacagtcaggacttaaggtgctcggatcacctactgctggcttgtgtgccacagtgggagctggactagcttctgctgcatagagaactattgcacttctgggtgactctttctcagagttggttgccacatttggaacaaacaagaaacaagtagatttcaagtattgtgatgttgttattgtctcttcttttttttttttttgaaggtcctagaatatcaggaaggggctctgtagtgcccgagtgaccatgtgggcagacagttgatatttaccttctttgaccacagtcctatactcgactacctaccatgttggcatgccttggaaagtccctttgatggctaagggtgtggctcagtggcagagtacttgcccaatatgcacaaggtcctgggttctatctccagcattgcaaaaaagcataagttattgagtcacttgaaaaattgcccaactagcagtgagctagattgtcttgaactcttctcttgctccagaatcctaatgatgtccagggacaggaaaaggctgaaaaggggactactatgctaacttgtccgtcacacttggcactggaacttgactctgtgaccttggagagtcctgggaaacagtgttcccaccatgtcagccaagcagggtggagttctgcccgggaaagtgagctcacagcatgcgcaagttgggcctgggatcaccaggtagaggtcagaggccatagccaaggggaaaccagtgtcaaagcttgggagacttcaactgtctttatcagtaaacacaatgagatacaaacaaaataaaagcctgaatctcccaagaagaaacacattgattgtgattatacgtgttctcatcaccgtgttaagtcatatacagtataaagcaaacaaaatagataagaaaaagactgacctatcaaatggtcttgtacctcaatctggggaaacctaaggtgactaggaactagttaggtgttgaagagaactgtagaacaacaaggaaagaaaaaatggtgcctaatacagggttggtgctgtgtccctatgtagccatgactgaagactgtgtgttctgttgttggtgctgtgtccctgtgcagccatgacggaagactgtgttctgttattggtgctgtgtccctgtgcagccatgacggaagactgtgttctgttgtccactcagtaggaactgatgtacttgtttcttaaatttagcctcattgcacaaaagaattagctctttatgcaactagaattgtcttgcaatgcctataagatacatataaaacaattgagagacaacacttgcccacataccccttgaagattacttttggtgatagtgacctccctgtagaagactttcagctagcatctggcttcagattaagtggggagggcagggaacccagagtaagcttccagaggtcttcgtcccaagggaacatgtgtgggattgcctccacaccaggggctgactacaagtatatcatcactctaagagagaccagaaagagtgtgtgccagggaggagtgggtggcatggggacggtcagacatctcccatgagagaactttgtgaacatattgaacaccctaccccataccacagctgctacagcacattgatggtcctttctgcacccaaatttcccatattgtcctggacccggggagtgattcattcacatattcaagaggtgcactgtgtgatggggaggcagctatgcttatgaagcccataccagtagaggatagccaagagtaagtaggtaaaacagcagagtgacaatgctggtggtcagagatgctatagatcaaagaaacaaggtgatagacagagaggcactctgaaaaattccagataatttataccaatagtgttgttggggggtgtagctcaaagggctttgcaactaccatgcctgaggccccagataggggcccttgcactgcaaacagcagcaacactttctgttagactttgttccacagaacgtggcataaaaggaaaaggggaatagcttgaccctggggacacctgatagtagcatggccagtagagaattgacacctgtcttaaggtcatgttgccagtgtgtatgctggctatgatgtcacaagaaggatatttcccatatgtggtcttcctcttcaaatcagccccagcgtaataactgggggggaaaaaatcagacaaactcctgtccagggatttctcaaaatttctggccaggaccccatacactgccaagttcctccaaatccaggaaatcctgaaagcctcttagggcccagaagagtctccacacagaggtttgatctcatgagaccctagaaccagaaaggacatgaggagggaaagaaacctagacacagtgtgcagtttagttggtactcttaaaaagagctaagggaaggacaggtgaggacagtgaccaaggcatctccaaggaggtgacatttagctgagcattggaagatgtaaccgagtaacgcccatgtctgagaaagtgtgggtcatttgacagccagcaaacaatacgcctagcatggccagggtggggagccagcaaggcagagaaggccagggtgtgagatcagaggcagacaggccaggcgtaggaggagcaggccatggtctgcaccctttggatttcatcctgagagtgaggagaaggcgcggggagcttggaacaaaagagggacatgagcttgtttccacttactaccacttgggatagttctccaattggtatggagaacagatgaggatgagagcgtgtggagccagctaagggacaggcctacaccagtggagatctcagggaagggcatctgcctgagaatggccttagcacatgacaagtactcttgatggggacatcaggaagcacaggatcactcttgacttccagatgtttctactcagtgatccttaaggtgtgtgaaaataaaatatataccacaatttcagtcagttgctgttaagtttctcttctggagttgggaaaaacaaaatgagattcctaacttgtgtctccctttcaaaggttgtaaatagaaaggtggaaacatggcctctgtcctgccagagctgtttctaaagttagagagcttccgagcagttcagtgagttaggtaaggacatactagcctcatgttccatctcctgagctgccatcaaccctttggaaaggaaatgtgatcatgaccgagctaagtgtcttacgtcaggaaataaaacaggtaacttccttgtgtgtttgtccaagtcagggctcatgttttggtgttgctcagacaaatggacagaggtctggcctggacagttttttcctacatgttactggtatcttcccccactgttgaggtttgcttagcatgtctggagtgctttacacatgcttgggctacaacttgagtctctgttactgatgccagcagggctcagctgctctatgtttgcttccagagattgagatggtgatcatgaagcttggcaagctctcagaggtggccgctgctgggacctcagtgcaggagcagaacaccacagacgaggagaagagcgccgccacgaactcagagaatgcacagtggagcaggtgagcagcgaggccctgctgggagctcctggacagcccctcagccttgagaaagaaagggtaaacacagccatggctttctcctgctcaccatttgttccctttgcttcagcctctggccaccaggagacacaagctctgggggtatgtaagggaagaactggcttagtcacatcctcatactcttattctttgacaaggtggtcagtccaggacactaccacggtggaacagttggtagctaggctgggtgtaaaggacgtaggatgttcccaggaagagcctctcatgagtcaggcttggaactctcctctcaatccctgattgccatgcttgcccgtgtctgtggggccttgacacatagtgtgattcagtgctgccacctgtcctggccctgttgctctgacctgttattctcaactcagagatggtttgtgaagctgatctgtgtgcttgcagatcatcagctgctcctttccatgccgctgtggtgatgtgctcagatctgtaggatccaatacagggagccatgagcctgaaacattaacactggagctttgtgagagtgaggagaacaagaggttttgtttgacttggggctaaatggcttcttttttttcttgcattttagggaacaggggtttttaagagttgattgggttctttttaaaccttggatgactaactggttactgtgatcacatagatttctaacaagcagaaactaactcaggtgactgagccaacgggttttctgtgtgtccttgagcccaagacagcatccctagcacccacttcccagcctgaggctgggagcaaggagagggtaaaggaagatggtcatttgtttcccagaacatcagcgcatcagctgaatcttgatgtctattccactgtagagagaactggaactgttggaatttcccttgtacagagtttagcctacactcagggtcaagttagacccaaaataaaatacaaagattctcccctcccccccaccgccaaaaaattgttgttttggggctatcttagtaagtagctctctctggctggcctggaacccacagaggtgcacttgtctttgcctcctaggattaaagattaatgcaccacaactcctactcagcaatctttaaaagatatataagtgatgcacctccagaaaaatgtgaaaacttttcaggaatgcaaaataaaaataaaagttagtgcttccagatgctcctgtctcagtgtctcttaccgaccttttcaggaccacttgtccctaactcattcctgtcttgttttatttcacccttttgctatctagtaccaaaccccagcatctttttcacatcatgatcctgttagtaatgggatgcttagcggcttcaaaatacttcatatcatatataaaggatagctcacccacaagccctccccttgttttgtggttggtcatctgtactatttccaagtgcaaatgtaatccaaattgcaaccagctagcttacaaaaaaaatgttttatactttactctagtctcaaatttggtatagtcattgctagaatctcatagaatccaaatctgcacacagcagagatgtagacatatctagatggaggagctatctattgcctgggcagcaggagacaaggacccttttgggcactgtccccttaaggttttccttttaagttttgtgtatcccgtgtttatttgaaacgtgacaaataaatttttactacttatttattttcattttccagcttcacattttgtgttgatgcattatgcaactagggactcaggatgaggagccgcaagtgtcactcagtagcagagcatttcccactgtgctcaaggccctccactccatctctcatctgccccatcaaagcctaacatattcaagatgacatggaagattctgcgccagtgatctcctttggacagtcctattttctattttcttttttttttttccattttttattaggtatttaactcatttacatttccaatgctataccaaaagtcccccatatccactcacccccactcccctgcccacccactccccctttttggccctggtgttcccctgtactggggcatataaagtttgcaagtccaatgggcctctctttccagtgatggccgactaggccatcttttgatatatatgcagctagagtcaagagctccggggtactggttagttcataatgttgatccacctatagggttgcagatccctttagctccttggctactttctctagctcctccattgggagccctatgatccatccattagctgactgtgagnnnnnnnnnnnnnnnnnnnntattttcaatcctcatagatagtccatactgctaatgcccacatgttcttccagttgtaaaatacaaccttgatcattttctggattatttggctttcttgacctcagcttggtgttcaatggggcagcctcggatgggagcacagcctcttaccccaggcctgccctgtgctgttctgttttctgttactgaagtcttgccaggctaggccctaccctgggaagggcagcatttgggatgtgtattttccaagttgtggccactttttataccttatccacagagcacagaaggtgagagacccactatcaattcttctagtcaaggaatgttggcccaagaaattgctgagccagaacacaggcaaaataaaatcacagagaagcatccttgatatattaagtatagtaatcaagtgcagggcatgaccccgtgctaaggccctgcagtcagcctcctgggctggactgcttctgtgcaggtgaggtggggcagttaaggaactcaccagagggtttgtagcaggaagaagcagaccagcatttgaacccaggcagtctgatttaaccgtaccttcaaacatgactgtgtcttgcccagtgatctaggtctgttacactggtcctgtgttcatcttcattccttccgtcctttatttaaagtaatgatacatgtctgtgctgtctgccagttggcatgggagtatgaaagagcaggaactttgtacctaccatctccagagagaccaggtgaatgattgtcaagtgtctgagttgtctatccttggtcaacaccccccacccccaccccaatagcagctttccaaggtcagagcccatctctcatttgtgtggatgtgttcccagtgcctgattctggaccagacacatagtgcattcaccacaagctagtagccttagacctgtgagaagcaaagacaagatgttgtcagatgagagagggaaatgcacactgttccagaggcttacagagatttcctcttttccagacccttcctggatatggtgtaccatgccctggacagccctgacgatgactatcacgccctcttcgtgctctgcctcctgtatgccatgtctcataacaaaggtacgtgtgctccttacctgcctgagtatgtgacacagtgctggctctgtagcatccttcctcttcactgatgcaaagggagggcactttgggaaggaggttccctcctggcctctgaggctgacacctacagtgctcttctttagcctcattacaatttctcaggtgttttctgcagactgaagccacaggcattggtgactctggcgtggtggggagaattcaagtgtggctgtctaacccagtgtggctttttacagaccctctctgctttacagttaacctagctaatgaccactttcctgacatcagagacaaaccagtcaaattggaaccttgggtttgctatttatagtacttgatgttcttgccgtggggtcagtgctaaaactgacctgtgtggaagcataggtttcctttctgaagagagctgtgcttctccatctgctggaagctgattctggtgttggcctatcaggctccccacaggcaagtttggagactttcctcaagaatattcacaagagctggagttggcatagattgacacacagcatcaaataacattccatccaggaggtttacgttaaacttggtgggaggagatagaagtgatgctcactaagacagcctatgtctgaagcagaacagggtgtttcttatttattcctcaatcattagtcttgaaaattaagtcagttggcagcacaaaaacatctaatggcaaatgcctccccatctgctgttcaaggcaacttcttggtcagtttctcacatatcctctatgaacctcggtgaagaggacaaccaactgcaccatggcacctgtgctgcctgtgtgacctgccgctgggcctgctcttcttgccattagggttgacacagagtttcacatctgtgtggaaatgcctgttgggtgtcgaggtgataacttgttctgcatctccttagtaagtagcactagggtcaggtgttactgctcacagtccactctccatagcccccttacagtgaggctgcttttaccctgttctttgctgttcaggaacctttagcttctcccttaacctccacccttctgaccctgttcaatggagtatctagacagcacctgcttttccactttgatttgatttcaaggactcccttctcagacctttagctggagggttttcaggcacagcaacagaagtctggtagaggtaagcttgaggcagctctcatccatgatccatggccaagcgatggaaactgcctctcttccatggaggtggaaaggagaaacctatgaggcagcttggggcacctcacaggagcccagagactgatgaagaaccagggacggactggaaaggactgtagagacctcagcaatgagtactaaagagcctgcctgcaagggctctgatgtggtcccaggcagtcccaagatggctgcagcttggtgtggtgcctacctgtggaatgcttcatgtcgtctcggctgggatcagcacactcgtcctggtagccctgtgtctgggacgctcctttggaagcgcagtagccaccacaacactgacaagcacctgttcccagagagcctcacctccttatgtgcttgtgctctctctggctgctctctcttctccaagtcaccacttactcagtgtgcttccctctcagccttccactcagaaatcactttctccaaagctatctccagttctctcaagtaactctgggttaattctacctgctgtgaaattttatggacattgctagacttggattgctaaatttgtttttgttttttggtttttttaaggttgttttgttttgttttttgaggcaatatctcatgcatcccaggctaatttgggatttactctgtaactaaagatgacctgaactcctgattctcctgcctccaagtgctctgattacaggtgtgcaccatcactcctgcttgaggcagtgctcaagcctcgtctgtttagcttaatactctactaactgagctagagctgctatccccaactgttaaggatttttgtatctgtgttcataaatgatactgatctatagatttcttacagttatttatctggatgcactgcagttatgtaccttattttttttaaaaaactagtattattgctgggtggtgctggtgcacacctttaatcccagcattcaggaggcagaggcaggcaggcaaggcaggtcttcagagtgagttccaagacagccaaggctacatagagaaaccttgttcgaaaaacaaggggggggaactagcatcttcttctttaaatgttctttgaaccagcagagccatctggacaaggtatttccccccttttttcattgattgattaattaattaattaattttttttacatcccgaccatagtttgcccttccttcttgccaaatcctagaccctatccctaccgccaattcactactcctctgtttctcttcagaaaactgcagaccatgaatatcaactagtcatggtatttcaaattgcagtaaaactaggcacttcctctcctattaaggcaacccagtaggaggaaagagtcctaaaagcaggtaacagagtcagaaacagccctgctcctactgttaggagttccacaggaagaccaagctacacaactctaacaagtccagagagcccgggtctgtcccatggaggctccctggttagtggttcagtctgtgtgagctcctgtgggcccaggttaagtgattctgtgggttttcttgtgtccttgacctctgtgactcctacaatccctcctcctcctcttctgcataattctctgggctctacctaatgtttggctgtgggtctctacatctgtttccatcagttgctgggtaaagcctctctgacgataattgagctagacaccaatatatgagtatagcgactatcattaggaatcatttcgttgacttttctttgtttcttttgtttatttgcttgtttgttttgccagtcatgtttggttctatccttggtctctgggctttccagcctttgggccctggccctccaaggcagtgtcagggtgggattcctcttgtgacatgggtctcaagctgggccagttgttggctggccacccctgttcccgtacacacacacaatttctgggccacctttaccccagcacttgcagttcaaaggttttgtggtgacccaatcactctattggaagtcttgcctgataacaggatttagccagttcatgcttcgtgtaccccattgctagaagtcttagctagggtcaccctcatagattcctgggagtttcctttgcattatctttctagggatgctcctgattccagttgtcaaggtatcttctatgagatttttttttttatcttgagatcaattatgtagtcttagctggcctcagacttgcaatccccctgccttatctctaaatgttgagattgtagtactccagcacactcagctaaagggaagtctttaaaaaaaaagattaatttattttctatatatgagcacattgtagctgtacagatggctgtgagccttcatgtggttgttgggaattgaattgaggacttctgctcgctccggttggccccgctcactctggtccaaagatttatttattattatacataagtacactgtagctgtcttcagacacaccagaagagggtgtcagatctcattatgggtggttgtgagccaccatgtggttgctgggatttgaactcaggaccttcagaagagcggtcagtgagtgctcttacccgctgagccatctctccagcccctgaaggaaagttttgaccactgagtttctccatggaaatgttagagtatctcttatgagtgagctttgctgatttgcatctttcaaggtatttgtccatttcatctaacctgttaaatttattaatgcaaatttgttcatgattctcctctgtcatcttgcattgtctataagatcttagtctgggtccctgtctagtttgtgatattgataatttgggatcatcttttttctgaccacattggctagaggattatcaattttactgacattctagatggttttcctgtttcactgatttctagtcttaaatttatttaatacatcctgctgcttccttcagatgtaatttctcttctgtggtttcttaaaataaaagcttagatgtgtgtgtgtgagagagagagagagacacccattgctgtttctagagcactgtagccagactttaggctaccttatgggttcctatatcatccttctccaccctagtccctcccaacccccaacactgggtagaagagaaagaaggctagaggggaaagggggtattaatatagttagactagttcctgttgattgggggcattgagttccttggggcagttttgatcttcatcatcaagatatctccagccagcaaaagaaggaacagcagtagcagtaatccttttcaggactgtagcctagcattttttataccttctcatgagtctccacaattccaaacgtcacacattttcgatcatcaggcatgcatgtggtacacatacatgcatgcatacaggcaaataattcatatacataaagtaaaataaataaattccaaaaaactttaaagaagttcaccaacagtctcctcaggtgttcctaaagccaccatgctttccaacttgtgtactcagcggtgcacttagcctggagctcacttgttgtgggtacagattctaggcagaccctttgcatccctgtcgttgggaagctacacaggaggtgagagcctgcctgcaggagtcaggaatgatttttggaccatgtgtttgaggaagaagtgtccaaaatgaaaggtggcaaagggcagagccacagggtgcacagagccgggaacacatctgccactaggaacactagggtgggaaggtggcaagcttcaagccaggtgcttcaagaagccagcaggttggagtcatcctgggaggaagcgcagtggcccaagagctctgttcagtgagccgtggtggttatagagccagttgagccaggaagtttcatgcctactgcatccctcaggatggattctagtccagccagagccatgccagatgtggacagtgtaagtactggtgacactagcacatgccccatgcaaggcactgctgaatgaactgggacgagtctgaccagtcatatctaagtgaacaagaagaggactcaaggtgatgggaaagggaagcaggaaatgagaggtcagagcaaggagtggtagagtatagctgggtgacagccaaagcagccagggaagacttctccagtagatgggacaacttagaacagagccggaagagtgccacggagtaaactctgtaaggatgaagagactgctccaggcaaagcttgcagtaggaaagtggagacatattctaagagcagcacataaacctagtgagactgcccagggaggcatgtgacaagattcaagtttatgccaagtatagcagggaatccctagagaacttagcaggaaaatgccctcagagaggctggagagatggcttggcagttaagagcactgactgctcttccagaagacccaggtttgattcccagcacccacgtggtggcttacaactatcagtcaactatgtagatggtgcccagacatatatatgcaggcaagatatatgtacatataaactaaataaataataggaaaaaaaaagaaagaatatcctcagatgataagtttccagaggagcctccagctcttgggcttttcagagtaggggagtgagctgctggagagaagctgagcaactcatgaggaagcagtggagatagtgtgggctgtgggaatggagctgcagggtctgtgacagagttgggaatcagagcaggctacgccaataggctggacatcagaattgagtgtgaagggtacaggtccagcaagaggacgagtcagtggggaccctgcaattgttaatgagacaggaggagctcacagctgaggaccaggccttcctttgatgtggatgggaacaatctgggtgatgagcgaattcctgacttcagcttctctggacaaatagtgattagaactagtaaaattgggccatttaaacaggcaaattgaaatcaaaagctcaagtttgacacccagagaccctgacatcctggggaagctgctgatggagggactgtggcacatggtatgccagcctggccactgtgcccaggggctgccttgggtgactttgaatgggggctctttggctggttggcttactggttagctacatttgattccagcttctcttttccttgtcctttcccctgaaacaggccccaaataagatattctcttcttagttaatattttcccccttagaagacaatttcagcctgaaagccttgttaatagaaaccaaatgtgagctcaagccttccagtaaatcttaatagatgatacactgccctgaaatgaagggcccacagtgggaagggttgcctgacagagtaaggcggtggcatgattcagccaggccacttaataaattctggttagtatctgtaatagaaaatgtagccttcacctcggtcaagtctgagtggaggctgtatgttgggcggctctgtagtcctagcctctccaattcactccatgtcctatgctgcccccactgtttacccaggaggcactttgagctttgggatttgttttgttttgctaagaagttcctggaacaccaccaagaggtatagaaaagctgaaaagtgggcgacaagattgtggggatgagagctggcagataccactttgcagattgcagctgacacaagctcagactcagaaatacattagaaactgactgacaatccgcttagctctcagaacaattgtctaaagctcgccagtgctgccagtacctatgagaattcagctaggagaacctgaggtcacaagcaacaggaaactaactgggtgacatgttctcctgctcacatctactccttagtcaggcctctgtctgcttcctttgtctaactttgccaaaggtgtcttctacccttgacctgcctgtgtactgcagctaagaagaatctagaagtcagagttgggagggaagcttttaaaagctatagtgtggagccatgccttccctttcccttctgggctctttgaattagttaattgaaagtgacacatctctatacttacctccatcctgaccgttggcaggaaaggaatgaggaagcacatggcctgctgggaggcaggtctcagtgggtcctgtgctgcatagaaaggtatctttgaaagttttcttgaggcacttaagacttgtgcaaacaggacaaaatcttaccaaaggcttatctcagacagaaagaaatgactggcaaagaagctgtagttcatttgccacagagcctgcctttctgtaactgaaaaccatactgcatgtgtgggtcacccctgtgtgccgtctcacattttacatacatgccctgtcatatggtggcattgacaagaagagtgaaagtgaaggattgccttcgggtcatggtttagaagggttgcagtccagtgtggctggagcatgaggcaggttatcacatcatatcctctgtcaggaagcagagcatgtgaagtggccatctctcctctgctaaacctctatggaaacaccctcccagacagatccatatctgtgtcttctgtgtcgttccaaatctagtcaagtggactgcgcaggggagccatcatgggctttatttctccagcaccaccagacagtattttgtttagtcaggtagttaaaaatcccagatcaaatgcttctcgacacactggcttctcaagactgcttgtcacagaaaacaaaactgaatccaggccttctgtctcctggcctgtggttgaactgtcctcaattgctcagggtcttgtttccacagctgtttatatggtaacctttctttttttcttttctttctttccttttttttttttttttttttttttcgagacagggtttctctgtgtagccctagctgtcctagaactcactctgtagaccaggttggcctcgaactcagaaatcctcctgctgtttgtttgtttgtttgtttttcgagacagggtttctctgtatagccctggctgtcctggaactcactctgtagaccaggctggcctcgaactcagaaatccacctgcctctgcctcccgagtgctgggactaaaggcgtgcgccaccacacccggcgtatggtaacctttcttctgttcagttgtcatattgaatcacttttttgtttctttggttattgttgatttgtttttgttttacttgtttgtctttttggtttacttttggtttattttgtttatagtgggccaaaattgatttcaaataattaattaactaaagtcaggcaagatcaagtaaaggtacttgctgtcaagcttaacaaaccatgtttgatacctaggaccacatagtaaagagaaagccaactttcataggttgtcctctggccactacacttatgccaccataatagatataattaaaatctttaaataacaaaatgagttaattcagtgagtaggtggcacatatctgtaatccctaccattttcaggagggtggagagttgttggtcattcggaggctgcatgcatgacctttttcaaaaataataaagctacctctgttaagatctagtcagtgacctttgagttgagaatagtgacacacacctgggcagggagagggaagaatggacgagcaggatctcataatatgggcagaaaggcagaaaacggagctgactctgggctttctgccacctctgaggccttagcaggcttctcttttgagctcattttatgaagaatattttatttatctctttttcctgtgctcggggtggaaccagggccttgtaggcactaggaagaaccttcacaataggattgtgcccttcctccagaaaatactgtctgaatttgagctttttgattggttagttgtttggagtcaggttttggcacatgataagaccttcttgagaaacatttgattggtgttcaagggctctggctgctttcagggttgtggccatgtgtgttgctgcgcacaccttgagaactggggcccaggtagagagatgggttcaaaggaacagaggaggtcttagaggctgcaggagaggcagcaaggcacctgacactgaaagaaccaagatcttaagaggtctttgtgttgccagggtagaaaccagagtagaacccactctactgtttttccctggggcctgtgctatgcatccagaactgggagtagaaccagacatgaaacttaccttgagtggcctgggagatgaaagctagctacccaaagctagccagagcacaatgaaggtgatggctgtgacttcttcccaccccactggcttcccaccaacctcctgttaagggcccctacctcaaccctccccactgtgtgtaaactataatttgggggtgaaagttttatctgtttccattataactcccaaataattgacacaaaaatcttttaagttttttaacaaactgcaagcctaggttgggcaggttctgagctattctagtcctctaaactattgtatttcccagccacgtggtcctttaccttcaatctgagtctcactctggcttactttgctccatgtgtgtcctcgtggggaagctcttggtgaactgctcttcatactcctcaggactccccctgggacctctccacattgtcacctcttttcctccttcctttctgtctacctgggaccccctgacttagatagaaagtgctgccctattatattctctgcccagcacaggctaatcagctctttattaaccaatcagagataattggggtatattaccacactgatacaggagatgctcaataattagtgcacaagatgaccaccaccagctgggcctcgaggtttaccttcaaaaacatggaacagccaacctttaagagcttcaccagaaaaattccttctttggcctcctgcagcctgactttcacttttcttgagttggattttcttctactccttagtcttcccttttgcaacacacaccaaatagaagcattttagccagattgcaactacaaatttccataggtacatagtaagaggcggcagtgactgaatacccagtgacagcaattccaaggggagtatttactatactcaggaccctgtctgcataggccatgagactagagtgctaaaggctgtatcaagacagaagcctctcactctctgcagccagtgagacaccagcccaaggacacctaggagcttttggagaggtggtgactattgctgagccctggagtgcataccccttgaatgcagctttcatagtggaatgcccatgtgggtggtgccacccccctcctccctaactggatctcagccacctttggagtcatctccaaaaagaaatgagaaagcacagaatcactctgagccttgatttcctcaccaaaggccacgtggccagagtgaggggttcagggctctgggagcctggcagatggtcaagaaagaacaaaatagaaatctaaggaagactagaacagccctaaaaaggggcttccctatgaaaacacaagtcctggctcccactggctgacattctaggggactctacccctgggcctgtcactgtcctctgtaatggagcagttgatggtgtagagaaagtgtggtgtgcttgggagagagatgctgcccagagccacagagcagcagtcctgtcctgtgtccacccctcacaatggaaggaaagagagatatggggacaagattgacgccgctcggggagtgaaggccaaaaatattgggttgtgatttgatttttgccctaggaaccagagttcttccaagtcagacacttggcatcaagatgcagaatccacaagttcagcctcaaagcagttctgtgggtgtgagagagccctacagaacaccaatccttaggccatttcttcctttccatgtcatttcaacaaaacagaacactgctttatagcaccagcatgtgcacagtttctctgggaacccagcagtgccacctccactgtcttaccaagattctagatgaaacaccacctggtactcaagggttctgagaagcgccacctccctaactgggataacaggaaaagctaagcttcaggcataaacagtccacaggggtctctgtacttgggtcaagcactgtgtttatttctgcaagtatttctcaagcaccacatcagaggaaaggatgggagttcacagtgtcttgccccgggccccaatcattgtggcagcactggcaggtcttcctgccatctcagctcctggcacctcttcaggaaaaatattatcatggcctctgattacagacttgcccattccctttccttatccaccctccatcccaccctttcttttgtctcttattacatactatttctttccctggggtggggggtattcctttgtatcttggtgatagatatgctttattggtttcactttttgtccacctgcctaggctaaaggtttgagtcatcctctctttgttgatctactcctcaggaggagggctggcatctgccccactcagctcagagcctgccgctatcatagtgtgttgggcatcccacttagctctttgctttcatcagtgagagcttaaggctatgattgttggggcctcatacatctcagctctgttccttggtctgtgtctgcatggagaagaaagggctgtccttacatgcacagacttggcagagaatggcagtgagttgctttggtgaaagctgcttcttttctacttctgcctcatctgtcagaggtgccaccattggctccagggccattctcttcactgctaagtgcccgacagcccttgtttctaatagagacacagtaggccttgagccacagtgagttcagtcaacagtcattggctagaatgtgagaacactgtcctatatggctttcatagttactgttagttttcacaccaggttgatgtcctatttacaaatagcaatagcaaataaatgttttgtataatagtgtgtttgtgtgtgtgtgtgtgtgtgtgtgtgtgtgtgtgtgtgtttattcatgtgggtttagaggtgtgttgcgtgtatgtgtgtattcgtatgggcttagggtgtgtgtgtacatgtgtgtattcatgtgggtttattaggtatgtgtgcatgtgcatgtgtttggaggctagaggcaaaccttgggtgttccaggtaccatcccccctgctttttgtgacaaagtctctcactggcctagagctcactgatttgggctaagctgtctggccagtgagccaggatcttcttagtgctagaattacagcatgtaccacatactgtccatggcatctgaggattgaactcagccctcatacttgtgcagcaagcatttaccaacagaggcatctccccaccattggaacatgtatgttgtgatatatctatgcacgctcagtgtacacagaacccagacagaagctaaaccaaggcagtggccatgccagatgtcactgaaaagtaacatggtggcagtggctgcagaccccatcttcaaagaacttttatcttcccactgagcagctttaccaaggaccatttttcttctttctccatttcaggcatggatcctgaaaaactaaaacgaattcagctcccagtgccaagtgaagctgagaaaaccacctacaaccatctgctggccgagaggctcatcaggatcatgaacaatgctgctcagccaggtactcctgtcttggggtatgcgagggaacagattcctagccaggcacagaagctgtaggtcccagatctgctctttttgagaagctggaaaactctcagcttttcctttcccctaggcaccaacatctgccttctgttgcgggcaggactcggtctctggagctgtgtgcaccctcaggtgcaatcacacctctcttctccctcttgaccagcctttcttttctttcatcgtggctgggaccctcctttactcgggagtctgaggccatattgtggggatgaactaggctgggaatctgggtgaatcaacaggtttgaaggtcaggtgaggatacactctttttttttttttttttttttttgaggaaacattcttgtgcccattgtctccagtggtttggcccagcacccatctgtagccagccactgaggtgatgatagcagtgggatgaagctgtgggcctaggctttcccagctgcagtaaggactatttttactccaggagatatgtgactatgactagagacactttgaacagaatgactaataatgttcctggtctagtgctaagcacctcaagttgcccaggacctctacaggttagagttatctggcttggaatgtcaacggttgcatagtagcattgagggaactgtgtggtcagtggtcaaggatagggtcagctctggctagaacttgtgaaggcaggaacttgatggccagcagagggagtggaactgctctggagaggcacataacctccaagtggagagggagaggaggtctggagtggatagattggcctgcaggaatgagcagagaccaattttccctgggcttttatcatgctaaacagaacctgctttgcacgtttatagctttggcatttgtaagcacaaaattttctcctctgtttcaaccttggaacattagcgaatcagcgggctgttgtcttgggtgtgtccctgcttgggcctcagtatcttagaactcagggacaaagcccaaagactctctgttccctcattctcctactacacttccacctttccttagaaataaaatgcaaagggctggagagatggcacagtggttaagagcactgactgttcttccagaagtcctgagttcaattcctagcaaccatatcgtggctcacaaccatctgtaatgggatctgatgccctcttctggtgtgtctgaagacagttatagtatactcgcatacataaaataaataataaaaaaggaaggaaggaaggaaggaagaaagaaaggaaggaaggacaaataagacaaataagacagtttgcttaatagtagttggccttaggttaagcaataagtatcttccctaggagaaaggagatggcttccagtagcaagcagttacctttccaatgcagaaagtagcagagacccaaaagcattattaagccagcgcccaccccacccccactgccctaacagatttcataagtcagccattgtgtttgtgtttgcttatcagtttctgcttatatagtttaagctagtctggattggctttctgttaactgtgaccaaattgtgataagcttcgtgctgtactagccagcacccaggcctggagccaggtgctgtgtaaagtcccaggaagaaatctctacagacacccagtgtggtcagccccgtgggaaggagagtttggagcccctttctggacaccttccaaagactggtgatgtcagcaagggtggggtggctagtgctggctgtcaggcccgctcattcaggccccagagttgttcctggacttctgccatactgtagaactgagcctcactggttctgctgggcccctttgctgttgtttcctgatcaggaacaagggtgggaacacctagtactcagaagtataggtgctgaatgaaaaatgaaataagaggagggtctgacgactcctgagagtgcagacgagtcctgtagagataagggagataactgagaagtaggcagagggaagagaccaggctgggcatggccagcagactgaagtggaccatgagagtagagagcaagcgaggtagtctggccaagagactagtgtatggctgaggtatataggctgggaaaagggaaatggaacccagcccctgagagggaaaagtttagggtagtgggttgtataagaagtgctgagtttcagatttagcaggtgagagggcccaattctaagtcacatgacccacagtgggtcttacagaacttgctgttctatttcctcacctggaagaagaaaactgttctggacaggcacagctgcagcacagcctcccgccttcccttgctcacacccgacaaagggacccataacttactaggaaggggattgatatgaaatggtcccacccccactcccatcccccatccccaaagtgagaggctttggatgataggccaccaggtggtggttaacctcaaagaaggaaaataaggccttgtgtttggggtgcacactgggctttgtgggtactgggctgattctgctgtgctctacagatggcaggatccggttggctacactggagctgagctgcctgctcctgaagcagcaagtactgaccagctctggctgtgtcatcaaggatgtgcacctggcctgtttggaggtgaggccatgccttcccctgcccttcctgtactgtcgtccctcagctgaggagatcagccatgaggttcttggcactgcctggtctggacatccctagcttagctcagagaagctaggcctgagatacctggtacccccaccccaccccacccacagtcctgctgaagcccacttgtccggaggtgcctccctccatccagaccactggaagattcccagattcttgcattgtagtggctaattttggagtaatctgcttctgggttagccctgggagttttcaaatgttccttttgtgtgacaaaagcttttatacatgtaaaaacatatatctacctacagagtgtatgtgtatctgttctgatccactccctccccgcctcacacacacacacgcgcgcgagcgcacacacacacacacacacacacacacacgcacacacacacacacacacacacacacacacactggtgaaagaattttgtgttttattaaggaggagacattatagctggattctgtaactgactcccctgtttaactgagtcacccattgtttcccctcagagctgcttccctcacaccttccttcttcttcaacagggtgcaagagaagagagtgtccaccttgtacgtcatttctataaggtacttggcagcacaggcatacagtagcatggggtatctctcatggagtagggtggtggagtcattgtaggcaatgatgtggggtagatagatgctcacaggtttacggatgtgtattctatggtctgcatctagaggctagaggagaactttgaggagctggtgtactcctcccattgtggaatatgggtatcaaacttggctcatcagggttgcaccaaaagtgagcttacctgctgagccattttgttggcccttggagtaccttgtcacacttgtgaatgttgggcactagcacttaatcccacagtctcttacaagaacattaaaatttctcaggacttactattagtttatggcaaattgtttataagtaactcataaatttactgtaatttatgagatgtatgtggatgacaaagtcaagctcataagtgatatctcctaatacatagaaaacaactatgaatcacccatgattttatcaattacacattgttaatatctataagtatgcatgctaagaaaactcatggcagcatctgaagtatcatcttgagtttagtgagatgacctttaggatctgaaggatttggagacatttatcttcaggtaattcttgctttaagagatccacttataccagtgtcatacagttttgtttggctctgaccataaggcatgagaaaacgccctcagcagcagtctttccagacactgagaaggtccttttggctttataacctggccaggtgaggatgtaacatatgctggaagttgtttcgtttgtgtgagcatcatggtagatggcctctggaagtggaagaggtaacacagcagggcttttccaaagaatgtccatggtcagggtgggaggggagagaggagttatttggaggggggttagtttagtaggaataggcattgccctagagtcttgagagtgatggagagtggacggaaatgtgtgtaaagaatgccaagtaggccgggcagtggtggcgcacacctttaatcccagcacttggaaggcagaggcaggcagatttctggtctacaaagtgagttccaggacagccagggctacacagagaaaccctgtctcgagggaaaaaaaaaaaaaagagagagagagaatgccacttttcctagataagttggtgagtagatgaaggcagacgtggggtctgctgagaccactctctcaccctactacttcacatggtggatgagtggctcagaagtccagccgtgctggagtcatcctagtgatctctgcaggtcctcctggtcctggttcccctgaacaaggctcacacggttcctgctgggctgggaggtggcggcacagcccctctgtcccactgcccttgcttacactgctggtgctttgcactaggcctgccaccattgttggttttaattgagctaagcccaatcctgtaatctaaaactctaccttgccaggaccagataacctgatccagctgcagttgtagacatgcccagacaaaggggcagcactgtgggccaccactccgtggggaggaaatcccatgtacccttcagagaactgcacttgaactttaagcaaaagcatgccccttctagtccgcccagaagaaaaaagaaaccctggggctgcccagtgctctttggacctctctcttccccatagaacttctagaaatctgtctgcctcttgaatgcgctgatgttgtaaacacagaaaagcacagagtagccatttcccagaagctgcccctcggccggtctggaacagaaggaaaactgcgtttgcattttactcccagcccagggagacagggtgcttcttactcagttcatgatgtaggacagaggcagcactgacttctcccaagccctaagaggcaggctctgagactgtgcattttctgtgcattattttgccttcacactgagtggcctgatagacatgggctccagcctattcttttcaggcacacaacaccttttgccatcccattcttacagtgaatcaggtggtgctggattttgcccaaggtggagtcctatgcagtcattgtccttatcaaccaaatgcaagactttcctcaaaaacaagtggggctatccatataaacttagtgctagtactagcggttgtgcctccccacccaggcacgagcctcacatgtttaacatggtgacttaatagcatttcccactttcccaacctctctggagaagtaagtgatgttaagcacctgaaatattaaccttgtctatgttttaattctatattatgtattaccttcttttgttgttgttgtgctctaattatctgatatgactgacgaaacgccagctttcaacaggaggaggctgctgagcagcacaatttgatatttagcctttcatctgtacatgtgtgctcacattcccatatgtgttttagtttctggaatttacaagaacttgtaatgaaaagcaggcggcctccaaagccaagcacaagcacagtctttgtaatgctgtgtttatggagtagaagaagcttctccctactcccttcctatctttgcagggagaagagattttcttggacatgtttgaagatgagtacaggagcatgacagtaagtacaaagccagaacatacagaggctggcacataagagcatacagaggctggcacataccttcatgcccacaaaatttgcagagggctctgtctcatttggggctttctggtcaagtggcaaagattgctagtgaggtaaatgtgattgccaccatcacatcaacatcagggtatattcatcccaagcccctgaagtgtctgcctttattgcttcctcaccgtgtgcccttggacgggttactacattctgagcctggctgtttgtcagctgtgcagtggggcccatacctcttgagttgccccaagcagatataaaatactcagcagcaggcctcatgctgtgccaatgtgaaaaagtacatatgtccacttctcccctctcttgctccctggggttttttgtttgtttttgtttgtttgtttgttttttaagacagggtttctctgtgtagccctggctgtcctggaactcactctgtacaccaggctggcctcaaactcagaaatccacctgcctctgcctcccaagtgctgggattaaaggcatgtgccaccactgcccagcagacattttgatttttaatccaagacagaatttattttttaaacaaagcactgtggctgggcatagccgtgtgcacctcatcctagctatttaggacactgaggcaggaagatttaaacccaggaagtcaaaactagcctgggcaatatggggagtatctgtcctggggggaggggtgttatttgttttaattcagaagtacttatgaattgtcatttcataaaaggatacaggaaaatagagtgtggtcacagttttactctagtgattatggtttatcctgaacaatgtttagcattctccagaaatacgaaagggatggaccctgggccctgcgactgacatgagtcttcagctggtccttaggagatgagctcttgccagccgaggtgggacaggcctcacttagtgttgttccactgctgcattagatggtggcattgtgtctgtgaggtggtcagagtcacctgcatatcattaaacacagggatcctttattgagaactgactgcttgcgaaggtgaaggcatattgtatatattgagtgtgacacgcaacacagtctcatcttaaagaaagtaagatagtttattttagagccaaatctaagtgaccatgtctggtactcagattaccctacacatgttttgttaaggaacttgtttcatgaagtcacagaacaaaatagaatcataaatctagacacttcaaatccatcaataggaacatgaggtgacaggttataacaaaagtgaaggaggtctctattgtaggtctcagatgctgtctatgacagtcagattaccacattccaaaaagcttcacccaacagtcacaggattcgtgctcagacagaggggggcaaggaactgctatcaaggaagctacagatagaggacagagtttggctccaagcctgcaatatgccagctctctataaccaagactccctcaccaatctgctttgtagaatcgtcaacattagaattgctctttttctctcttgctctcttcttgctctcttgctctccccttccccattcccttccctgcccctccccacgtgctcatagccatggctgtcctctacttctcttctctctccctctctctgcctctactaccctcttaactcccctcccattccctgaataaactctattctatactgaagaagaagaaggagaagaagaaagaaggaaggggaggggaggggagggagaaaggaaggaaggaagaagaagaaaagctttttttttttctttttttctcccttgggaactgttgctattgtcttctttatccagctgagggaaaacaggagtcagagaggctgagtagtgtccctaagtctgtccagcctgctcgtgtcagctgggcctccatggagagtgatcctctgtgctgcttctctagagcaataagctcaggtgcagtccctgccgtccctgcctctccctggagcagaggacagactagagatgacagctctctattttgtttgtctctcagtccccaagtagcactcaataaatagatgacaagtgatctttttcatggacataactcaccaaagcatgaagtgatggggacatttataatgaacataagtgtttaaagtgtcagaaagagaagagcagacagcatggctaagtggctccctggcttccatacccatctccagggctctggcagccgagcccttacctcatctttgtcactgcccccctgaagcatccatggatcactttcaaggtcatacctccttttcacgtgtgggttgtggtgactgtgcctccaccttactgacccacacagccccagccatgcctaggagggcatggtacttccctcttcacaccatcagtcacagtggagcactgcacaggttttcaacgtctcctctatctagtgcggagtcccctcccagagtgctcctccatggtgcccctttcagcttggaaatgttaactctacaggttgtttatgatttgaaaaagttggggctcccaagcccctgaagtgtttgcctttattgcttcctaactgtgtgcccttgggcgggttacttttaatctgagtctggctgtttgtcatctctgcagtggagacctctgagttgaaatacccagcagctggcctcacacaggacccataagccaaaagtgtgtcctctccctcatcccaccccacaggaagtgtgtcccctcccctcatcccaccccacaggaagtgtgttccctcatcccaccctacaggaagcttcctggggtttgcttcttttactccagtgtttatgcgttctgctggacaatgcttgccattctccagaaacactaaggcaacacacctgcaactacagtcagtcctcagctgcccctagaacactggcttctgagctagcgtgagtgagtgccactcaagctgctcacacattctttagtgactcaggtttattaccaaagggatgacagaccctgagactcactgttatccccacccccatggagagaatgggaggaatcccatggaggaggtcctggcactgtaggagcaatggaaccaatctgtattgtaagaaggccctgctgtgaaaccagtgccaagaacagcctggagtgggaacatggctctgccaccctgctctgggatacagggattttgaaaaagggactcaggcctctggaaaacagtgttaaacatgtcccacaaaggaaggcagccagtcagcactaggcggtcatggggccctctgacttaaatgaagggaaaagtacacacacacaacttggagaatgaaaagagcctgccactcatctggcacacgagaaatataggccccgtctaacccagagctggctcatttgtggcccaagtacaggagggcctttgctgaggcttcctgtgctgtctctcctagataaagcccatgaatgtggagtatctcatgatggatgcttccatcctcctgcccccaacgggcactccactgactggcattgactttgtgaagcggctgccatgtggtgatgtggagaagacgaggcgggtgagtaagtgctttctggcctctcctaggccatagggaaagggtctttagatcagttgaagcctaccaccaataggtgtctagtcacctggaaagaatagcctcacgcatgcacctactaccatacatggctttctttccaaagcctggtgcccttggaaattggagattgagattctgtggcaactggcacctctgtgggctgctgtcagactacctgcgccagggcagagtgcagccaaaaccctggatggaggccaagccaatcttctttgaagcaagggaacccagagcctagaacagccagtgtgggaggtggatgtgagccctaggcacactggcaagctgtccgatagtgagaggatggtgctggctgcgcaggagagcgtgcgtacagagccctgttcttagaacagcagaggtgatccccttatcagcactttgttctgaggcggccgctctaggaagcagcctcgctcaggctcttcacagtattttatctcctgcgtaagatctcggtttctttcttagaaagcagcactgccttttcctggaaaatcattccctggagacatgactgggagtggataatttagaggcactcatgatcgctcccaggctcactacatcgtccttggtctgcttgtggcttgggggtctcactttaggatttcagaaagcaagtgacataaagttgtgtgtgcctcagacaagaacctctgtgacctcctccgccctgctggcacttttaaccatgtgctcaggggctacagaggaagtggagactttgtatcttcaagcaacacacattcccagccccctgagcaaaccacagactcctgcaagttgtcctctgacctccatgtgtgcacacaacacaaatactttttttaagtgtaagatcaaaataccaaaagtgcccctgactcctgccagcccataagggacatccatgttgaaatcaaagtcatcacagtttggggttccaagcagaacttgaatttgagttatccccactcaggtaggggcagttggaaggagtggctgagaaagaacatgagttccttagtcaggcctacagaggttatagctgtgtgatcttggaagcattgtttaagtccctgagcctaaagttcctcctgtgccccctcagcttttgcccacagtagctggcaggatggctgtgaagtttctggccgacagtaaacactgaaagtgtgttggtgggaaaggagtgcaatgcaccagtgtcttaagatgagcgagaggttccactcaaggactcgctaagcttagtgcagaggagagccagcagggggcgcgggcaaatggtaaagtctgaactgaagtatcagctatctgggaagccactgcccaagggtccctgtgctagggtgttgtgtttggtactagggatgaggccagagcatgcacatgccagcacatgctcaccctcctctcagttttgattgagacagtgtcttactaagtagcccagattggcttctacctcagcctcccagatatctggaattacagatttgtgtccccacattctgatcccatgttccctgtgggcacagcaggtttttatgtttgtcactattgaccttgaggaaatggggtggctgtgtgttacacattaaagaaaactcagtcagagctcagcatttttaaaggaaggacatttttcttccatatttcaacacttagagacatttgcttctcctcccatctttgtctacaaactcagccccttatgatggcacaggaatttttgccatggtgtcacctgcatcttcctttgttcattgtattatgaggtttcctgttgtaagcgtggttttcgcagctctggacaagcttcccagttcttacatgctaccagtgacatcaccccagcctacaggggaggggctttcctctctttctctctctctctttctttctttctttctttctttctttctttctttctttctttctttctttctttctttcttttggagacaaggtctcatgtaacccaggctagtcttaaactcactatacagccacggttaactttgaattcctgatcctccttccactacagctcaagggcggagaacatagcctgtgccaccacgcctgtctgatggttttctaagtgattttttagggctgcataaaggttgtcaggagttctctgccacagctcccatgggttttcccattggtcagagtttagggcacctccatgtaattcactcttttcagctgagccatgagagctacttcatgaacacagtgttttctttctcttgaatcatttctttaggacatgttctcagaagcaggatttctggttcaaagggtatggatttttttttcatctctaacgtcaccacctagctttctctctgggccaggcccacatccagctgcttcaaccctgttttcaggatgacttactttcacagctgtttccatagccttgtgggcttctaacctgaatgactgtcacctaaatacaacagcttgcaaatatggcaaggaagctgacagaagtgacctgagcacttggtccagggccacctgtgccatgaaaaaccctcactcaccatgtactcctccccagagctgagcagatactaggaactcctgctctcactcagccaggtggagctgagattcatcagcctccagaccttctcttccaaagccgctgtatgagctgggtttctacatgctgaatgtgactggggatggcttccagactcggagaagctaagaaatggaagtttcttcatattagacctcggtcaactgtcttcccttttgaaatttggtctcctgggttccaagatttgaaacagtcatcatttcttattacttttggctatgacattaaaactttgtatcttgagccgggcgtggtggcgcacgcctttaatcccagcactcgggaggcagaggcaggcggatttctgagttcgaggccagcctggtctacaaagtgagttccaggacagccagggctacacagagaaaccctgtctcaaaaaaccaaaaaaaaaaaaaaaaaaaaaaaaagaaaaagaatataaaaaaaaaaaaaaaagaaaactttgtatcttgatttagcaaagaaaagaagagtgcttgataaaaccatgggtcccaagccctgactctttggaggccaaggactgtgatcagaaaaacagtctttggagtctgggcttccatctctctgcttgtcagatgggaaccacatagggtaattaagaggtccagctggcaggcagctgggcacagtgatgcacacctttattcccagcactcagtggggcatgggggtgtgcagaagcagtcgaatctctatgagttttaggccagcctgatctactgagtgagttccaggacagccaaggctacaggctacatagagattccctggaaagaatgggggtgaggggaagccctacacagtgctcaatggccatgagtggtgagagggagctgttagtatctctaggtggtggcatgaagttgccatggggtgagacagcatgcatgccagcccctccggctgccctgtgggactcacctctttctgttcttagacatgggcttcttttgtatgtggctttcccttgagagttggtatttttaaatggtattatatatgttttatagtctattttatagtttaaattactatttttatttgtattcctggaaatatcttccattcaacatttgcagagtaaaagcagatgttttaccaaaaggcctacattaagagccaaattctgaattcatagattccttggaaagcctcagtcttccaagggataggctgcagaaagcagcgtgtgtttctgttttctcatcccagctgtgcccccgctgggggtctttgccatcagaaccctgaaagcaatggacttaacaacatgagcagactgggacatgcatgcagtcggttcttttctttccttctcctcatccctgaagttgtaactgcttacttaagagctctggctgtcatataatcctgtgacacctgctccccacttcacatcttattgctgtcttctttggactggcacagggattgcatttcctggtatacgaggctgtgtcaatgtgtgcctgatattacagaggcttggctcagcgccttagcagctgtatgggccaagctcactctgtcctatcagcacctctcagcattcttgctcctgtagtcttaaatttacagtatagaatccctgaaccccagcacatagtaggtgcttactagataggaactcatgattttttttgtttgtttgtttgttttgttttgttttaatagaactactcctctgtttcttccagttggtacaggctctatgaagtctagactttaaaatcttctaaggacattcaggttgggtcctcctgcctccccaccattactgcagggaagctgactttgccctgtagtccctgtttactcagataaggccagggctggggagtactttctaagtctctacacgaggtcctccaaggcagaatcagggctttgttagctaatcagagatactcagtgcctgagccactcagatacaatgaccttccagccctttgaagttaaaaatttgttccctcttgtttcttgaaaggtctttactagataaagggtttctccacttcttgtaagctaggactgtcaccatctttgccacaaactggaaattcacctgtgtgaagtcacacagtcatttgtcctgatattcctttctattggtagtagtatctatcaaggacctggattaccaccccttatggcaggcctgtgttggctgtgccctctagccttgtctcaggactgcagcataaccagagagctcagggttactgtgccttgttcaccatagtgggattgggggccagtgctgaccttgcctctggaactgtattcccaacgtcagagagagacctgaaggtaccctcaccagtggcttgccttgtgcttctgggctttctgttggtggcagtcttatttctcgagcttgagggctacttttgcacagatactcctagcagctggtatctctgacctgttctctgctctcaggacatgcctggttgtcacactggatgctgacttttttcatgggtcaagggtgcttgtgctgacaagctgtgtctgcccctgagatgagctgggagagcctgaggggctcacaaggcactgctgtccattggccaagtatcgactcacctgtctgtcacattcctcctaaagcccaggcccaagaggcgagagatgagagttggactctcattgagtctagccagacctaaagcctacatgcatgctactgtcctgtcttgtgctcacatttactggataggactggcacacaaactggggattactgtctcccagccccactcagttggagtggcaaggaagttgtagcccctcctgaagtgctgactcaggcagcactcctcaccttcctggctatttgctggctgtggactgggcaagctagcagtcaggagatcaaaggtcaaagtcaaaggtcatgagtcaaaggtcatatgagccttgaggacaggtcctggcaaatggcaggtgcccagtgaagtgacccaggcttcaacctgttggggacagaagcaggctctcccctgaaatatcatcttcctatgacatctccaggccatggtgcttcaaggcctgttctgtctctcttcctttccatttaacctagagtcaccatgcaatgccttcatgcagggcacctaaaaaacacctttaaaactccactctcctctgctttctgctctatccaggccatccgggtattcttcatgctgcgttccctgtcactgcagctgcgaggggaacctgagacccagttgccactgactcgggaggaggacctgatcaaaacagatgatgtcttggatctgagtgagttggccatcctgtctcgcactagtgggccaggggatacaggctttgctctgtcatttgacctgctgtgctgtgggagtgtgtgcagcatgcattctgcactgccgctgacccaggaccgagcagaagggcagtgctgggcagcagaaggtccagtgagagtgggccgcactgacatgagaacagcactggcctttctggtgttgtggattaaagagtttctaagtccagtggaaaaaagattctcttgatgccaaaaggaagcctataaaaaatacattatcaaaatgaaaaggcacaacaaacccagaagcacatcaccagtatttaggtaagaatgagggctttgcaaatcagaaaagcctgtgcccagcctataaccttgaactatgtattgaccattgtcttagagagtgtttctattgctgtgataaaaaaatcataaccaaaaccagcttaggtttatttagcttacacttccacatcacagtctgtcatcaaaagaagtcaggaaggcaggaactgaaactgtggaagaatgctgtttattgtcttatttgttcctcatggcttgctcagcctttttttggaacagcccaggaccacccgacacagcaccacccacagtgagcttggccctcccaattcagccattaatcaagagaataccaataggcataaccacaggcccatcttgcaagggcattttctcaattaaggttcccttgtctcaaaagactatatagcctgtgtcaagttgataaaaaaacagacaaaacaaataatgaggacaccatcattcattgcttcaaaattccctctgcaatataagacaaaatatttattttattttattttattttattttattttatttttgagacagggtaggcatctctgaatatgccaggctggccttgaacttgagattgctttgcctcacttccaaagtgctgggatcacaaacatgtgtctccatggcaagttaataactgggatttaaaagagactgtggtatttccagagtccttctcatacttgtatggctttctcttcccttcatttaccatggtacacatacacactaaaggacacaggttttcggtatgttagagcattctggtgcactaggaatctgtttttaaaagatctatttttgctgtttttaattatgtgtgtatgtgcaggaaagagatgggggttgagggtgatgaatgccagtgtcctggagcccagtggcatcagatccctggagttacagccatgaccaccatatgggtgctgggaaccagagctaggtctctataagagcagcaagcccactaactgccgagcattctctccagctccgagttagggctcttttaagaaatggaaaagccgctgggcagtggtggcgcatgcctttaatcccagcacttgggaggcagaggcaggtggatttctgagttcaaggccaacctggtctacagagtgagttccaggacagccagagctactcagagaaaccctgtctcggaaaaaaaaaaaaaagaaaagaaaagaagagaagaaaaaaggaacagaaaagccaaagcagcctggcagtaggaaaagaaagggctggctggctaataatagtaatgttatcctcagataaggctgagcctggatgtcgcatccatgagtggaaagctgccctttgccatctcttgactctgcttccctttttccccatctagtagaaagatggctaccatcagccccagctaagtagccctgacagaaagaactataaaaatccagagtaggctttcagtagcccggattggacagtagatcttttcctcaaactgtgcaattgtcagaggacgatcaggaacctttgccaaggacacagggttagctttgaaccctaagtgtgaggagggagacccaagagaataacctcgaaggagaggtgcaggcaaggcacacagggactgctctgtgtccaggtgtttgaaaccatccttctgaggcatgatttatatataataaactctaccaacctcggtcagtgagttctgacaaaacttcatctgtgtaaccagctctcataacagtcattgagtgctagctttcaagccagctctgccctacttcttgtcctccaccacagcctctgtttttctctctataaaatggggattgttgctatgaggtagtggcacacacctttaatcccagcacagcagcactcttttaatcccacgcagaggcaagcagatctctgtgagttcaggccactctgatctacagattgagttctaagacagcctgggctacataaagaaacccccgccaccgaccacccccaaccccatcccccccccaaaaaaaagttgtagttgcaggtagaggactcttagcatacaaggctccatcctccatccttaccattagaggaggaaaaggcagaaaggtggccactcttgtttagtgactgggtgaaaggtggcatgaaaaccacagccacactcctaacctgagcagctagtagctcagcacaccagagaatcctacctcctgcacggctccaggttgcccagtgtgggtccctcaccgagggaccaagatgccaaagagcccctcactgactcctgttcctctgccggcatttctcgtgtttgtgctttcatctctccttgtgctagaaaagaaagaaattatgaccctctttgcctgtttcctttgacccttcaccctgaaaaacagctgtagtgatttctgtaaggctagaattgatcgagttggccaaagagaatcaggaccaggctttctctgatttgatccatgcagagagggagacagctcccttcaattttacatccgtgaaatggaattaaattttatgctgggaattcacattccttctctccttcccctaggaagggccctgctgaaataaaggttaaaagtatttcacttatcaattttaattgattagttgctagttgagatcacttaactgagccttatggtagttggccattaagaaagtaatggctggctggctttacccagcctgattgcaaattatgtcttttgctaaagagcatgatgttcagaaaacttggagcaatagggattttaaaacctggtgctaccatgttgttagctgctgctgctgctgttggtttggttggttgtttaaaattatttttggtgattaaggttgaagatcatcatacttgaagtacacagatttctataaagctgaccgtggaatgggtggatgatgcctgagtgattggaagcctcatatctttctgtcttcattccaagctcagaagctgatctaaaaaagcgaggtttgggattggtgcatgataaggtctggtagtcttaaagaaattctgactttacacacagcaggaaacatgacacaacaaatatttgttgacctcattgtactgataagaaacacagccttagacaagagtctgctgaccagtaacgggtctttggtcctgcatagcagagctgtgcagcaaaggtgtggtcaccttctgggtctgctgtgattgaagcctgtctttgttcttctgaaaaggaggctggcgtacggcagaggtcttgagctgtttgctgtgtctgctgaatgaaggagggaaagaagagcagaggaggaaagagaatttcattcagggaatagcattctgactcactgacctctacgcctcagcctgaccattagcactaagtctgtgttgtgtgcccaagcctttccttttgcagtgcgtctgcacccagcacacattaatagtcatggctttttcaacaaagaaggaatcaacgtattcttgttagttgaatgagtagccactgttttgcaaatcccaagactctagggtacaagttgctgtttggagttagaggtggaactgtgttcctctgatctcagtttgccctactaatgtcacagacggcctgtggtagagccagaagccaactgtgatctgtgtttgagatccagcctaagtttttattttctgtttattgatggatgagtgtaactatgaaggctatttggttttgtgatgctgggtattgaaccctgggccttgcacaacagaggcaaatgttcaatcactgagctatgcccccagctttctgtgaatgtcataaagaacttgcagagggtcccatcccgtgcccctccaccctgccatgtttcaacagttccctccaacagctctgctgttttctctgttccgcttgcagagagcgcttaagcccagtgagcatgcctgactggactgtctgagtgcctggagattcatttccagaaaacatgtccagaagctcccgagcaggttatgtggtttgattataagtctgtaaactgtgagctcattgatttctcttgcaaaggcaatgacctttttgcaagtctatcagttctcgaaaattctgtttgcttattttgctgatgacataatcatgtgcttcatactggtaaaaatgaaaaaaatagcacaaatagtaagcaaaaggcagagggtagcaatgtcctggaaggtagcagcctgagctttcagcattgtaaatactgggcaggaatgaactcagcaaagagcatttgcctagcatgaaaaggttcccaatttcattctcaaaactgcaaaaaaataattaatttaatgtacaaaataaccttattaaaatgagaatggttgcttagcatatgagaccatagattcaatccccggtaccacaaaacaatgaatgaatgatagtgaaagccaagtgtagtgtcatatgatcacaatgactcaagaagctaaggcagtattgttagttcaaggtcagccctggcccacaacataaacaatcaaagtatcacagaagatgactactaaaaagagattgttacagatactgttcttagattcttgcaactaaagacaccatcaccaaatatattggattaaaaaatttttaaagtgggctggagtgatggctcattggttaagagctcatactactcttggacctaagttccgttcccaggactcataccagctgcctcccaactgtttgtaactctggctccagtggtcatatgcccctgactttcagagtgcatgtgtactcacattcacaaaaccccgtgtggagacatagacctacacatagtcagaacatattttttaaaaatctttaaaatggtcgggcggtggtggcgcacgcctttagtctcagcacttgggaggcagaggcaggcagatttctgagttccaggacagccagggatacacagagaaaccctgtctcgaaaaaataaaaaaagctttaaaatgtagctttaaataaaagatccctttctggcaactgggtcttgaaaccttcatgagaagctctggttggctaaggtgagtgggatcaacattgcgtctcctgggtgtgatgatggccttgtggttgtgtgggagtgtgtccttgttcgcactgagaaaacccatgtgtttaggagtaagtgttgctctggagtggctcagaaaacagcaatatatggtattgagaacatgagggcagaggcagacacagcctaagtgagagcagagcacagccagccaagctccacctgccggggcagcaacaggtgggcacacatgtgcttactgtaaaataagaatgtatgagagtggtaagatggcaatctgtcctttgaaattgtaccatttaataaacagtgtatgctgtattcagaaaccgggacctcaaatttaggaaagcctggggatgtgtcatagctgtgtgatgctgggcaaattagctcacacctatgaaccgtttcctcctcggtacgttgagtttaacagtgcctgcttctgggttctgtaggctaaaagagagatttcgttggaaatcctcagcatggtatgcagtgggcacaaactttgagaatgaacacagtgagcattcatgtcctagctgcatgttgtgtagtgagaatctggaattttggtttctttaaaaaacacagaaatagtttaagaatatgctttcattttaatcccaggtgtagggatgtggggctgcttcggactgtctgcagcagctgactgtgatttgccctgtgctctagcagaggcatggttttgccagctgcagatggtttctgtgatggtgtgacatttgtaattgagggggatataatgccagagccccaagacgggattggtggttggtggtcattcgggggtggttgtggtttgatagtagtcgtgctcaaagaagaaacaaaagaaaagaaattagattccggaatatctatttctctctccactctatccttctttctctcctagctagtgatggggtgaaatggggcagggagtgggaaaaatgggaaaaattaacaacccacaaagtagcaaagaccagatacaatgctgagaactgaaataagttctttgctctctagaagagcctctagaaggggtctgagaaagcatggtgtcatgagtgtacctgtcaaaggcacacactggacaatggcaaagccatacaggcttgttaggtagatgttccaggaacgagggtgcctgctgatttgaacagaaccaccgagaccatagtggggagcccaggtcagtcccccaggctgcagccctagagaagtcctttattcagtgtcagaccaaagtaatgacattgctagcatgagacccaagaggaatgtgtacatggcagccaggggactgtggtttagtggctcttatgcccatcctccctggcctactcctgcttgttaaagaaagcacaacccactcaggctctcttttggcaaagcaccctaatgggtatccctgcctctcacccagcacaacagatagacttgaattgttcctgagccttcccctccagtcccataatcagccttgcagctggaccctttaccttcccaacaggcctctgcacctcttccctacccaagtcatgtgacactggatgcaagctttctctgtgcctcccctgcctgtgttgtgacatgtctaaatctacctgacagtatgctgtgtggggctgactgcccatctctgctctgctcctgactcagcatctagccccactccttaagcacatcctgcttagttggtgtctcttggggccatgcacagcacctgtcacacagcaggctctcagaaaggcttgtacagcacctgtcacacagtaggctctcaggcttgcaggattgtgccaactcaggctttagcagcaatttagattatgtagaagcatgagagtgtcattaacatgacaatggcatctccaaaggttgtctcatttggagccaatagatggcaagttacagactgacatttggtcctagctgtatacagtatagaacagcaggttcctagctgacacacatcccagtctagtgaaatatctcaagaatcttacaccatccatgatagtttctttaaaatgtcaattctttctattttagcagttgagtggccccaaaccagtttgcttttctgaatcaatatttttctctttctactctctctctctttcattcctcttttaactacgctccattcttccccctttccttcatttttaccatgctttgaaactgaacctctgaactgggtagatcaggggaaggaaaacagatttgaatgaaatcttcctctgaggaagtggcgacccaggattagcgccattccattcccctctctatgaattaggcttctcctctttatacttgatgaataatgttgctggctgcttttcagaaatgaagtcgaaatatggagaaatgaaatttgtatcttataaactgactggaaatgtgattataatacagctgtcagttttgttcaagtggaaaatttctaagtaaatccaattgcagcattatttggttcttttaaaacagggtgatgtagctgtttcctgcgtattgattatttgattggtacctgtctgctggacctttttttctctcagtagcactcattgatgtggtttaatgtatattcctgtaatctttccctgttttataaacttacaatcataattgagctacattagagagacatgttctgctgagatcacaaggtcgcctaacgactgtgccctctctggttggctttgggttgaagtggacctaggacagttctgatcgagacaaaagctaggaggcttcaggctttccagacaacagcctgtgcatgggaggaggcactgcctcagggaactggcttcaggattctgctctactttctctataaaatcattgtttctacagaaggcactctgcagcttgaagctgttttccaaaaccctatctgtcctgtgcatttgaacatgagccacaactggcctctcaggagggaagatgcccaaagaagcatggtttctgaagcccttgggagctgtgtaggttctggacacttgcctgccatggcatcctaaggcatatcccatgatctttccacctcaggctcctgtggctcagctcctgtggaggctgtgcagagggtaatatgttgcctgtcaggacttagcagtcctgacctggcctcattgagcccagtccataggcatcagccaagacacactcagacttggcaggtcagaaagctggcttcagctctttctaaaacccatctccccataatgccctttggtggctcaccttatttagactaaaatccctgagtagcctcacctcctctctgtctctcatctccactccagttcggctattccgtgatatcctagtgtctgaccctccttactgcccacagctcctccacaattcctgggactcagagcacaagccttggaggagcagctcctttgcctctccacagcagatatcagacgcttctgtactcactggcttcctggcttggagtcttaatctgcacttgtagcacactgccctttataatgctgcctagacatccacacttctgtgatctggcccttgagccacacactgccttgtgttactgaccactgaagtcatcctccttgacaccatttggctgacaggagaaagaaacagtagggagagctaccataggaaataggaatctataggaaaccctggttgcaggttagtgttgagtttcaagacatctctgcccctggcctgctcagtgatgctctctggggctatgcccacacaggactctagaccctgtggctccctctgcccactctgtggcctacctcccccatctggcccaacaagagatggatcacacaaggtctagtgactaccccttgcctcaggaaggaggactggcttctggtcctgatatctcatcgaccacagaacacccaaaaataaatctctggggatactgaaacagcaacacatatcgtgacctttaagtccagagagtgctgcctccacatgcctcaccgtccccagcatctagcttgctgactgcccaccccaccccacccccatctgcttttcgcctgtcttcattctcctagcccactgcagccccactgggaagagtggattggaggaatcagactgctccctcctcctatgttcttcttagaagctggcttctatttagattaggcaaagtacttagaagtgttttcctccaggatcctaaatacataccaagtgtgggggcggcacactaggataccataaaatagctattagaatctctgttaaagagcaaagggctatacagagaaaccctgtctcaaaaaaccaaaaaaaaaaaaaaaaaaaagagcaaagaatggttgcccctcacaagacttaaagactcccaggtgaggctctctgttgtctcagtcaccagtgtaacatgtagcaaacacagtagatagtcaccaagttttcaagagaatgtcaaatgtttcttgctctactgtttttaagaagtatctacagaactggagctcaggtggtaagatgtctagcgagcacaaagatatcctcttgcctctcctgagtgttcccattcagtgctcagggccacttccaggaagagaaacccatgctgcacccaacagctttctctgagtgtaccctcagaacttgggacagggagacaggacgatcacgacatgaaaccatgtctgagaatggagagcaagagaaatatacaaaatactgaacttggaatacttcaatgcttaaattgtcatttctacttttatttgcctggaaatagaagtgacttggtttctcacagtaccctagtgtgcagagctgctgtggagcatggagtccacccctgacctgtcagctagggcaaggcagatggagggaggctagcagttctgagttagccagagctggggccatcagctctaagttcagagctctctggagccaagcctgacatctgaatgccttctagaggatcccattgcagaaccaggattgggaaccatggtattaggtaaagtgaggaaggttctagaactcggcacttagtcttcactactctctgtgaattccacttccctctggaagctctcctttacccacttgacaaccagccaaatgtcagcagagaagtgactctgggcatgaagcagcagctgtgtctgtctagctcctgaaactggcttccatggtgaggaagatactctgtctaactcctcattgtttgatggatctcaatgaggttgacagtcctaaccacaggactgcagtagtccctgtccctaagtactctgcagaggagggggcgggctttcgtggtagctgcagcatggctttcttttcctggaagaagctctgagcactcaggagaggcaagagaaggcatgcttccactgtccagctgctctaatttggtgtggacagctagccagtcctgtaacagtcagtcattcccttctctcacccccgttgtgactgcttgtgtgcacttgggtttgtgtaaagtaaccacacagcttgcctgtcatgatcaagcccactaacctcaccagaagcctcaaatgccctttctgacagaaaagagttttagagatgggttaatcccttttccccaagcttcctgctcagacccctggtcccatatgtgagcccttagccaatgctgaacccagagagctctgcagcccccgtacctgagtcctcaggcaagctatgctttgccttgataaaaatcacttgacctggttccacatgaggttccttcacagccgtctgcagcaaggaaaccccagcctgcccctaacccatctgcctcctgaaccagtgccagtcctgaaagcagcctgctcagtttcaaacacagccatgaaaatgctccaggagctaacagactctccaggccagagtccgacaatcagaccaggggagattcaacaattggaagacctgagctggcctctcctggttctcacagcttgtccaaatcatttgcttataattaagaattaaaagttcccctcccctctttcagtctaccacctagtttctccttggagacgaccattttgtatcccagttagacaaacctttcttcccctccctgacaaaccttcaggcaaagcacacacccacgattccctggatcttcatcttgatacatccaagctagctcctgcatccatctttttttcattgccagagccagccctttgcattttataatatgctttgcatttttctaaatgcagccggggttttccagagctgtgcaaagccaggaaataaagcatgtcatttaaatgactcctgttaacctttagcctttaggtggcttctcataaaactcacttctctcccagctctgctttgcattctccagtgcagggagcctggtgaagagcctacagctttctctgtctgctgcttcccttggcatcttcctcctctgatcccctacactgtacgctcacagaagtcagaggcagaaatgtgagcctcaagaagtacacagcaggagattttgagctagatttacatggccctattgctggtatttcctgaggtctcccagttccctggcttcagctgcttcctttcctatcatcttgctgtctgaaacagtaatggtcacaaaaagcacatagtgacattttcttagggccactgctagcaatgtttcagacagtttaatgccatgaaccctcacaagctggccaagtaattcctgttatcctcaccttttacaggtgattatgctaaaacagaggagctcaaggtttaatagtctgctcaatcagcacagcgcttggactctgagctctggactaggacacacccacccccatcccctgctcatgcactgaagagccactcactcacccatcattggctaagagtagctcagcccaaccctcctgtaggcagctggtggtatccagcaaggataccacagacaggtttggatgctccaataaagatgggaaatggtgaattcagcttttgccagggaagggaacaagaactgattaagaacctgaattgttgagcccagtgtgggtactctatcaaatttatgcaaaattgggtgctctgaggtgccaagaacagtgtgggcctcactaggcttaaatcctaccatggttcctttttatgtgagctctaggagagaacctaacctctttgcttgcctacatcctagagtctatgactcctgtcttctctgccttctgccttgatcttctactcttaaggatttcttctaattatattggacctactttagcaatcccaaaagtttttaagttaatcacacttgtgaagtcccacttgaagattccccattctcaagttccagaaaatagaacatgggcatctttaggattcaactggaatatggaaactggcagctttcaaggctaaaaaggatggcatgggctctctgttacatcctacaacaaaggagcccctgagaatggatggcagataaacaaacaagtatagttagctaggagatgctctggggtcatatgactttgactccagctcaaccaggtctttggcagatgaatccttccttacaggactgagacctttccagcaggctcttgggtctcagaaacagtaagagcctttggtctagactcctctgttttgaatttccagttacaagttttctcttagctccttccctcccacccctcaccccccactgtactctctgggagtctttgtccttcctcagtcttagccacacaggccctcccctcacccccaccccccaccccgcctttttgtctgtctttgtcaccctgccttggtccccactgctcagatgcttcctgtgtccagagctctttcaggcagctcctctcacttttcccaaaacccacttacctttttgccctaaaaggctgaagtcttagcttcatggctgtcagccctccgagcccagactgctcagatctccagctacagggctggccaccacttttcttctcatgtcctcagatctagtccagccatcttgagccagagctcagtgggactttggaagctgaaatgaggcaggaagaattttaaccaaagctcaagttgggttttgaaaggggcctttatccaggaaaggattagagttccagtcattcatgggtctgttgctgactcaagtggtcaggatttaaaatgaaatcaaacctggcagggcattttggtttttatttctcaagaaatgagaacattgttgaccattataaagattctgattcaggccttaagtgtatgtatacaaatggaaaatttaccaagctttataaacatgcccctcaattttgacagcttttgttttgttttgttttgttttgttttgttttgttttaagatccatgcttactttagacacttagaaactggcctttgagtgaatgtaagcttgcaagcgcagctatgtgtgcgcacttacacgtgcagagtcagtaatttgcttagtaaaaacccatagatggggctgggaaggggttcagtaggtaaagtgctatgcaccgtgaggttctgagtttgaatccccagcaccaatgtaaacaagcaagcacagtggtgcatgcctacagtcccagttctggggaggggaggcaggatgatgctcgggacttaccatgtgtctgcatacatacacacaaacccagactcacttgctagtggttactctactatgtaggaccaggtgggaacacctagagggctgccccttcccaggaaacccaagtccagcagttcacttttcttcctgctgtgaagaaagtatatttctcttgaaaacaagtgccagtctgccctcaacactagaccagagtgcatttatgtttaaaatctgagggtttgggaggggagggggtagcaaaagtatagctcagtggtagagtgtatacttcacatgcagaagtcctagctcagcccctagtaccaaaacaaacggggaaaatacttgggaattaaaagtaagacttgatgaggcccagtcccagtgggtgtgttgctgaactgggaatgaggtgtgtgcaagtgcagccaagggttctggggatagaggcaagcaggccagcttctgcaccagctccctatagcctcctcttcctgtagacagatggaggagctttctccacagagcagagtcagtagtgaccagagcggcagtctctcctgtcacaactacaaaggtccaagtgacatatttggtgaatccatattctagttttgctttttggttgtatgcaagattatatttagcactgcagattgtcacaggtagaattgaatccccacctagttagagagaaactcagggatacagccaagctggagctcttcctccagcagaacatttaatttgggcttccaaccccagccctgcaatagcaagccccgtgctaaagcctgtcagaggctcagctggtcagtgcatgaagagggacaatgagagctgccctttacctacagctcagctgagcccaggcttatcagaccttgatcttattgcctctcattccatccctgcattcagagccattgtccactctggagccttattcctccccaacacaagtagccaaatgtctgcttaaaatgggactagagccctagaataacctacctgcctcagtcctttctcctgagcaggccaacctcttctcccagagagagagagagagagagagagagnnnnnnnnnnnnnnnnnnnnaaggaggagaaggaagagaggggaggagaggggaggaggagagggagagggagagagagggagagagccaaggaagctgtcagggctgtcttgtggagagaagatggtgggggccagacacacaaaccctgcctctgttggcagtcactgccaacctcaagcctcccttgctgtgaacccatacttgttagcaaggtaaagaaggcctaagcctggccagggatctgtgcatagctgactccctgacctctccaagtctgtgtagtctggtcatttcccagcaagaccttttctgattaccagactctagttctcagcatcctcacatgcatacacttctctgtttcggggtccctgtttgtttggctaaccgtacttggaggcagaaaccctgactcttgtccacagttgaatccctgccagtaaagtaggtaaatgaataaaaatgagaaagggcattaaggtctgagcctgtaaaatgaaacatcagccttatttcagaaaagggaccccaaaggcatgcctggggacctggccattctgacccacatttgacataatagccacttgggttggccttgttcttcactgagcacttggaatgactccaaaactggagttaagggcccacactactcttgttcactcactggctgtgtgagtcatctctgcagctacagcaggcagtctgaaatgctaaagatcaaccctggctccaggtgggcttggagtcaatcactggcctccacctgatgccccagtcaccccctcagcaagtgtgccctcagctggtaccccagtagatactgctgaggaagaaatggctgagctgagtcacagttacctaatctggaggaaaagtaatgcattgttagcaatcctgaaagcagttaaggtccgtggccagatggctgtgcatcttccagaataagccatgattaggggcctccccttggcataaatcagcaggctcatgcagggagagtaggggcctttttcagggcttgggaaaggagctagctcccagattctccttccacaaagttctgtcatcctctaaaggtcttagataaccttctcaaccatctatagttggggccacaaaccgtgtcctaggacgatgatggaagggacttttaaatccagaatgtcagagaacactatggcagcccattttctctccatgagccttaattggatggtcaggataggcacatatatggtttgtctaaaccaaggtgggatggttttcctgagagcaaaggaagaagctagattcaggttgggccacatcctggaaatcacagacatacccagctagctcctggtctctccagtcaccctgcatcttggccaccctcatctttttcagcaagtgttcagtaaggataacagaatgccatgatacagcagaagaccctcagaggattggcagctaaggcttatggggtatttagaacagtgtcacatttgataagctcctggcaggggatggtctgcagctaagagcagcctcatttgttggatcataagttgccttgtcacgaggtgtgtgtaactctgctctcaagtgccatatgtcatgcttgtgggatcaggctggatctggctgtcatgcctgttaaacctgaactctccatggctttacccagcagacttcctgcttcctatcttgtcccacatggcaagaaggagctttgctcaccctgtcactcacgggtgtatctggtaaagactctcctgctgtgcctgtggctacaggacctgcacatgtccagtggattctagttctttgtgcttcgggtccagaacacatactctccctgtcccagtggctttaccaactgtcaagacttgggaaggtgcctggatggtgattctgagcctgttttccaggatcctcttagttctgctctagccccaccccaaaacatgaagaaatccaaggagcagacactatagctgaaaggaaggggagagtgcagtgtgcatggccttgcctggtttcagggcatcacacaaatcctggccaggcctgtttggccagggcagaggttgatttgcaaatgtttcatgtccctaaaccatgtgctgttgacacattagggcaaagcccagaaatcattcttaagttttggaatttctggcctccctgtctctacctcagcaatttcagaaaattgagaagctggagaggcagggatgtgaactataggctatagattcaggtggggctgcgagctcagccagagttttaggtacggtgacccaggtgccctctgccactgtagtctttatacccatggcaagtggcctgctgtatctcaggcttccagacctctgggaagtagcagttgcttcccaaggagcccatgaagctaggctgagtgataaagtgaagcccagtgcagaaagtacagcaccgggtatggaaagtgagttactgctcttgcaggtgggcctgcctttggtgatatttacacccaagaagcttagatggcctttggctctgggatgttcacataagctccaaagccaagcacatggcctgaagagcagccccttgctcgtgcttaggataagctctttccacaacatgggcaagtgacctaacctggtgtgttgctttctgctaactagagcatcattgtgaagatccaccaagacagtccatggtgtctgacccatgccctcactgtagtacaggccggggatacgaactcataggcagtttccctttaaagacagctaccatgtgaaggttcaggtagtggtggctagagccaagtcttttcactcactatctagaagagatcctccaggctctgccttttcaggcctgtatctgtgaactcagtgttgcctcttgctttcctgattcacacacttcacacacctgggtaccagggagcaccacaggaggccttagaacccacctttgaggtgtctgtcatgtccgagaaccactgcatcatgctcattgtgtgtttaatacttttctcagtttttcctcctccctcagcctaagataggcaggttagcccatcctaaactatgccagtgacattgtgggatccatagctcataaaatctgaagtccttcacaattgtaccatcttgtaccactactggtgctagcgggcacttgaggtgcgtgtgcttgctaggccatctcagggcccctgccagctcacatggcccagcaggaatgcttatcatatggcaggaggaggatgagatggtcttaagaacatttaatatgcagtaccgtcactttgttttatgaactgagtctaaatgagttgattcttgtggcctgtagatgtaagtatggacagagttggcttaatgggccatgcatctagcacgtccattgtttaagcctcatgtatctcaactgtgtagcacatagacactgccctgctttaagtttcagaccaaaggcaacatccttcccaaccttcctgtatttgagaagcagctggtgggttagactaggagattcaaggctctgaaaggttgcatgcacagctcaaaggtatactagttgctgctagtctgccctctacagctaaggcagggagaagttggcagagagctaaagattacctccctcctcaataaccctgccatccttatgacaagactctgctctaggtgcatcagataccccttggccagaaatgaaagccagagggttctgcttcagtatacaggctgatgttctgggtccagactctaggacccacttatagctgaaggcaggaaacgcaaaacacctctgcacccagagagtgctacctggagagggtcacagcttctccactgcacctgacatcctggaaggggaagacaggcagttcagtataattgaatttttgtgttctgttaggtgtagcctcaggcctgagagtacccatagccccgagccatgggctcctccacagtgcactttgctgctagtctgtcctctacaccctcttctcaaagagtagaaatgatcccgatcaatacccactgacagtggctggacagctggctcactccacctcagccctgtatttacactaggatagaagcccatcctggtgctgggaattggaacgctcttccacgccttctctttgctgtatacatgtttgcctagcaaataatagctgaacatacttcctttgtaaaagactaaaaccacgcatagtctgctaaaaggtgaatgtcatcttcctctcctgcccagtgcctcacccaggctagcctggggcatgcggctcttgattccccgcccttgtatctgcacacactcacacctgtcttcccacagagcctggcctgcttgtatcacggttgtcaccccagccctgacatgggccttgctcttatttgctactcagtaaatattgacctactgaatggctgccatttttacacaactaggactgtattcatcgtgttctgcaatttagttttggcactttgaagtggggctttcctgtgtcaggaacatgggtggagcttattgtacttgactgcattcagtggaagtgcccagtgtatgatgtccattgtgcaagtaccatgagcacgggcattgtactgcatctggttactcagtgtctcagaggacctggagcgtgagtgtgagccctgtcggcagctgtattccagcctggtgctttactggaagggacttaccactgtgcaattgctgggctgagttagagctagtagggaccttaatgatagctcatatcttgaaaaactggccatctttgccacctgtgtgacagaaaaacagcttccatccaagagtcctcaacttgaagcccttgtcaagggtcaggaggtggcccagagaaggctcctagctcagagaatggagttggttagaaggccaagacgactgtcagggagcaggattcagcctgccaggccccccctccaagccagtcggcccatcagagaggtgccagggaagacttcctgcagctggaatttctgcatccatcactcctgtgtccaggccacacagctgcagtcactcagattccggccatccttcacactcagaattgctgtttagacattcccagccctccactctgtcggtgtttattttaaaatcatccagaaacatgcttgcaatgttagttagctctgtcaaactctccattgcatcaggcagtagtacgtcatgtgcatgggcccaggtcctcagaagactcacttgaggaggacctgcctcagaggaatgcgcttcagaagccctttgaaagtcatggctgagggaaagcagtttgctgtgtttgtgggttctctgaatcagctcaggggccactcagagaagggatgacaggcaagcaaaccacagtcttctgtgacaaatgtcctcaggcagcaaaatgtgatgttgacaggcacgggtactgctgcggagcccaggctccaccatggaccattcattgctacacgtcttccagtaatccctctccccagcccccagagcaactgcagccctggtgcagtgcgcttttaaagcaccccacctcctctctctgtaaagccctgaggcaagcagttttcccctctgtttatatctaccacacacacactgtgagctgcttctattaaaagcagtcagagattgataacgggtgttaagaaggatgtcacttatttcacagggtgaaagggaagttgctgtggctttcagtaaaagctcacagacctaggccgtggcagcatgctaaccactggggggcagtggagctgtgtgcccccagcagcttccttccctggcactccttgagtcttaggactcctcaccttagaggacagggaagggcaccaagaaggaggcagatggaaaggtagggatgagggttctctctataatgtgaccaccagctcagggatatgaggacacatcctcagcctgaccttggggtcccttcattggaaaatgggaaagcttcatgcactatacgcctgaggcacagcaggcctctgagaggtgttgccagctgagactggatggaggtctgagttctccttctgaatcaccccacttttcttcacaggccaggggtgctcactaactgagctgagcagaggtctccgataccannnnnnnnnnnnnnnnnnnnttatttcggcatgggcttccctaccagctggcactccctctctgtttgggcctaacggtcaggagccctccatatccaggaactatcagctcttcgaaaagcatattcatctcatcccctggcgagcaaggttcccaaggttttcctaaaagtcattttggaaatgcagatttgagcacagttgacttcagttcctggcacttcaacccttccttcacacctctctggttcttggcatcatggtgagagcagaagtatggagctggagtccgttagagtctgagtaccaaggctttgtgtgaccctgggtgtctctctgaaactgtgagcctcagttgctacatgtacaaaacaaaatgcttgtagaaactaaacggtccataatataaccctgggtgcatggcagctgttatgctaactgctgcatcatggagtccttagcaggggaagagtcaggatatcggaagttccccaccttgccctgtccggcacagaggtccctatgaaccatcttcaattgggccttcccttcggtcccatccttgagttccctgctgagcatcagtctcctcttcctcttcatcccttcacagcctttgctagcccagattagacctgctcattacagcagtgaggagaagagaacaaaggggaacacagggtagaaaccaggagtagggagacgccccacttcagctgaaccaagttacacaggcacacctgtctgctgccgtcctgtcagctgctcagggggacaattcacacagcggtgcctgccaccagcagcctaaggagttctgctcaggcaaaccaaacccttgactatgccacaaaaaggacctgcagcagagttattaagacagggagaaggcatacttaaatgctgtgggggaagggagtttgacatccaaggcacaggcacaggccttttgaaagtcatacttggatgtatttacaatggacacaaaaggacatggctttttaggttacattgttccaagggtgtaatttacaacactgtttcaaggaaaaaaacctggaaagtagacctttaaaaccatgtaaagatcgcatataagccagtcatttgtcttagtgtaaagatccctctggaagtgagatgtgtgaggggtgaggacagtgaacagagttaaactcaaggccacaagcagcctgccctaagtgagcaagctaggtttcactaatgtcctcctagcagtgtctttaggaagacagacaccaactctgtaggcttttgaacggacgccttccccttcccaggtcccctgaatttcctatcttcctctacagcctcacagtgagcctggctaacacattctggcaggctagagggcatgcctgactagtaacagtgctttgggtttggttctgttatcattgtctagttagttagttagttagttagttagttagtacataatagcactatgtgcccaggctggcctccaattctgtatctttttgataagtgatggatgcacaggtctgtgtggccatgcctgatttgcatatgtaccagtgtttttctcccctgcttcctttttggaagtgaacaatgacaaagtcctttctgtcatatctaaatgtcttttgaaaaaaatcagtacttctgcaccaggcaggacacatatctacacaaacagcaaaaagaacatggcaggatagagtggagaccctctgaaggcaaaaatccccatgcctccagctgctccagaaaggccattgccacagccaagccaggtgatgggtaagagaagcagtggcttgtgggacacacttttcctgctggactgggatctgacggtaacagtgacaggagaagtggtgaggtgcctttgggtgaaggctccactgtgcccacctggggaatatgacaattggcttctttttcatgtgtgaaagcctctatagtgagtagggctacccacgcgtctcagcagtcccccatctcagcttttctatgacctcttgctagctctgcagggcttgcagccccctccatcttttttgttcggtttttgtttttgttttttgagacagggtttctctgtgtagcccaggctgtcctggaactcactctgtagaccaggctggcctcgaactcagaaatccgcctacctctgccttctaagtgctgggattaaaggtgtgtgccaccactgcctggcttcacatccatcttaatgacccaccttgctgtgccaggagatgcaagctcagggctcagagggaaacagaggtggcgtgagtcagggcttccagaggccagacccagaaaccctcttacccatggcagggaggcccagccttcgagaagtttccaggcctgcactgtgattacagtaagcagtctggaggcagtgtctgctctaaccccaggtgcacagctgtgggaggagacagctgggctcgtggcctaacgggtcgggtctcgttggctccagctgctctgaagtacaggccttgcagacctgcctcgcccacaccatgcagttcccttcttaagaactgacctcatgtggcccttttgcatgtctgttctttaggaaagaaaccgttacatttttctcattaggggccttgtagacctgctgggcactctctgtccaaactgtacacacacatcaccctacccttctcctatttccgctatacagttaatactgtaactcaaatgtgaaaaataagctttgcatggtggccatgaattttacatgaatcacattgaaatcaataaagtctgtagaatgaagcaagttattgttataaggaagaagtgggagctgacttaaaggagccgtggccctcaaagtacataatggaaaaagttgtccagcagtgatgagcccagtacagcctttaacctttgatagttcttggctccctcagaactggggatgtctttgaaggtatctactttcttctggggaggtgtgaggaagcacaaagtcacattttccatgacttgtttcttctttgaacccttgctaatctttttttttttttaagtgggtaaatctttgaaatgacactgtttcaagtttgggatctttgctgtaagtggcaggaaaggtgggcggtaatgttatggaaggtggaaagcctgccttttctaggtcatgtttcaagtacggagaagtcagacaggaaaggtcacacaagaaacaagacaggggctagagctgagctagcatgcttagagccccgagctccatcccctgctccacttaagccaagcatgtcagcaatccctgtaagcccagtacactgagaggcgaaggcaggaacgtcagttcaaggtcatcctctgggatgccggaagttcaaggccagccttggctccaggagatcctgtctcagaaatggtgttagggatcaagcttttaaggctttaaccccagactagccacatggtgcatgtcctgtctctaactccaggccctagactctctgatgagtccagcttggcacttctgtccaggccaacttgttccactcagatagcccagctgtgtgcagggcataggctgtccaagggaggcaagctgagcaattggctcagctcacagctctgccacagctttctgggccactgaaaaaaagagaagagctacaaacaggttagtggtgtggccatcaccagagctttgctatgggagtcactcacacagataccctggacatactttatcctcccaggaaaaccaagctaggtagttcctcccctcctccctcctcccccccccccctcaccatgtcacagctggccacacgccctcaccatgtcacagctggcttgtcttctctcagaccctagaccaagaaggacactgtcctatgggagaaatcagggccactggcacttttccaaatgaaagtagtcatcaattcactgtagaaaacaagaagaaagagagcagtactttttaaagagatatgtgtaaccatgccacaacctaaaagctcccagcagcttgcctccccttggtgcttgctgttctctaacctccattgttcccctcagctctgcgcaggcccactctgacctggcctcctgccctgccatactttgcacagcgtgaaacctgaggcagggtctgttggcacatataggaaatattttgcctctgccgagttacgtcttgtgttgacaaatgacgatggagatgatgtttttacatttatgtaaatagtacaaatgtccttttacaatgattcaagtcaaatggagagatggctcaggagttaatagcttctgctgctcttccagaggacctgagttcagtttgcagaacctacatcagactgttcacaaccacatatagctctagccttcatgggatctgttgtggccgccacgggtacgtgtattcacaatgacgcagacacgtgtacctggcatcagtcacatagacagacagacagacagacacacacacatttaaaaaaaaatcaactagtgaaagtagggatgtaactgagggagaatagtgagtgaatggcacaactatggcagtactgtttcaggccctttgttttctttatggacagcatctcactttgcagccccttctggcctggaactctccatgtagcccaggctggccttgaactcacagagtacacctaagtactgagattaaaggtgtatagtaccacacccagtatttatttgctttgtgtgtatatgtcttcttggatgtatgtatgtgcaccatgtgggtgcaatgcctgcagagggtgtcaagccccctggaactggaattacaagcagttgtgagcagtctgacgtcagtgctaggaatcagattcgtgactcttaactgctgagctattgcttctccggccccttcatttttcaaaaacagactataaagttaaggatgtgtcttagtggtagagcttgtcagcatttgagaggacttgggttcaatcccctcgtattgcaaaacaaacaaacaaaccccagctctgtagtgttctgatgagaggctctggtatgctttcccctttagctgtaagttcttcctcattgaaccccttcctgagcatggaccttcttgggtcctctctgtaccatctgtgagtatgtctctagcatgtaattctgcagtgggcttggggctcaaggacaagcacagctggaaggcctcccttatactggacagcagtgtgttgccagtagctgggagagtcactagaaggcagttttctaattttttagcagtgggtgaatgcttctctctcttatcaactgccttctctataaaatgtactgagcccctcatccttggcaggttccacatggtctttccctatgtgctcagggcctctataagtgccttttaatatttccagtgtgtgtgttaacctttcatttaaatttgatgtatcagaaatatttttaaaggcttagcttaattaatttctttccctgacctgttattttatatctttctttacctaaagcattaatgccaaagagcactgacttgtaggactgagttcaagactgttacaattaacttctgggatgaggatgccccagtggtccatcagcccagcatggcgcactgcctccctgttcactggtgttgtcggtgagctcctccaaagccacattctggctgttgagtgtcctaggacagaaggagaaacagatcctgttactaaaactgaaattagtaaaaacaaaggcagaattcaaatcctattccttggttatgttagccacattcaagtccttatgtagtcacgtgagactacccaatagtgggaaagcagttcttaggtttttgtatacacttaatctagagtgtgtatgagtgcatgtgtggtgtatagtgtgtgtgtgtgtatcagaggacaacttgtgagaatccttccttcctctgcgtgggttccagagattattcttaggttgtcaggcttggcagcaagcatccttacctactgaaccatcttgctggctggcccttggaagtgcattttaaatttaatgttaattcattcaaattgaaatggacacgcaggctaggaccttttatactagcaggcccagttgttgggcatttctttctgcacagaaagccttactgggcagcatagcctagaaatgggttttgaccaggaaaagagagacacggggttaggaatcttgccgaatcccagctcctccttcaataaagggtgagccctgtgttcacccttgctgagccctagtgtcctgccctggtaccaggacaaggatgcagacttctcacaaccactgtgagtggctgaagtgggagctgcatagcaggcactgggcactggccttctgccacattattcctccctgtgcctgagtggaaggtggcaggtagaggcccagagctgcactctgtctaagccaccagcctgtggcaggaagccccagaccttggagacttgattcttatctagccagttacatctagggctcagttaggcaggacttccctaagctaagcaaacaggtcctgcccccctgccagctgtatccctcatgggtgtccatcactatctaacttagattgcctgcctggggacttcttgacttgctcttttcattgcctagcaaatccaagtctatgacatcctaactccataagcctgcttccaggcagcaagctggaaaatctctcgtggactagggtggggtggggctcaatgctgctatagaccttcaggggctttggcagcatggaggccaggcttgcaacccattgtcccctcccaatgtcgtacccaggttttttgcttatctttatcctaacttttttctccctggtggaatatttccactaccatgaactttgtgaaattaatagtcatgcagcttagccaaattgatatgacccagctcttttgcaggcagctgatcttagtacagtcacatgtcctttttcagggtcttccagattcatctgacttagtgtgacccacaaagtctttcaggattagggtttgacagtttgattaggtacatgtggaggagcttgtcctgaactcactgtgggtatttccagctagggtcctggaaccatcccttctgaagaaccatgccttctgcagcagcagcagcagcagctcaggcagctcaggcagctcaggcagctcgggcagctgctgctcggtcctgtcactgccctgctttctcataagcaaggctcaggtgattacacttctgcttggatagcttccttccaatgcttagcacagagtcagtgcctattaaataccttatgcccatagcatttgaaatgaatggtctacctttgcaaaggaacagaatttttggaagtggtctgtttgcatagtgtgcaagggccttttaaagaatctaagcaggctaagctaagtggtgcctctagttgtgctgcttaatcttcctaatttcctctacctcctgccgtgggagcagtctgtacccagcagactgtgggttcgagagagcaggaattcattttacctttgcatccccaatgcctggtccatagcagacacccagtaaatatttgattgatcggtcggttgattgattgattgattgattgaggaatgggtgagaaatcctgaggggtttttgttgttgttgttgttttcttttttaaccttaagtaaacctttttcacatgtaagtcctaatctgggtcttaattataaatttaaattcaaggccagaatgcccaaatgcctgtagttaccttaatgacttttcctagtcggtacttcctgggcatttgtttatgttccttaatgtggctttaataagctaccctgactggcaggtccctgtgatctacaaccttagcccctacccacccatatataccaggcccactaaagacaagtttcccagccctgccttgttttctcctggctgtagcccatgacacacaacctctccaggctgaccttgacacgttcacactgagagcctcagcctacagagaccttgatagccctgcctttcacagtcacaccctgtgactccttccttctcctccctcctggcctgtgagagcagggaatctgcagtcactctgccccaccagtgccttgtccaaagcaggcaccccttcttgacagggtgtttatgagaacacactgtgcacgtgtgtcatgaacaaaatctccctttgttagtattttaaatggtaattgttgtacatgccacagcagggttttggagggcacaagacaactttgtagagtcggctcaatcctctcaccttcacgtgtgtttggggatcacactgaggtcatcaggcgtttgtggccaatgcctttttccactgagccatctcactgactcccaatgttttatttactttttatacatgtgtgtatgcatgtatgctgtagtgtgtgagtggacacatgcggaccatggtgcacatgaggttagtacaccatggaggaaaatcctcgcctcccaccttgtttaattcagtcttttattgttcaccactgggctggtgctgggagcttccaaggattctccttgtatgagtagcagggttacagacatatgctatagcatctgatttttatacttgcacactgagccatcttttttttttccattttgcattttgctttttggtgttttaaaacagggtctctctgtgtagccctgactgtcctggaactcgatctgtagactaggctagccttgaactcacagaggcctgcctgcctctatctcccaagtacagaaattacaggcatgcgccacctctaggcttcacttgcttctaaagtgcatttgtctactatatgtgagagagagaagtagaagggttaggggacagctaatgaaaaccagatctcagcttcaccttgttgacacagtctctcttgtttcctgccactgcaatgggctccagcgcaccctgctgcctctgcctcccaactccctttaggtgtgctggggttacagaagcatgctgccatgtcttgccttctgcataggttcctgaggttggactcagcttatcagggtctcacagcaaacactttgagccattttcttatcccctatttatctagttatatatgagacatggtcttgctaggtagcccaggatggcctccagctttcagttctcctgcctcagtctcctaaatattgggattacatgtcagtgtccccaattcagctaagagacaagtttgtcaaatagctaaagtgaaataaatgaattaataaagtttcctttcttgtttaattcaagtatatttatctttattttatgtgtataggtgtttcccctgaatatatgtctacacatcatgtgtgtgcattggctgtggaagtcagaagagggtactgcctcccttggaaatggagttacagataattattagccaccatgtgggtgctgggaaatgaacctgggtcctctgcaagaggagtcttaactgctgagctgcctctccagcctagcaagttcatttttaagagaaggaaaaatagttgagtgtgtcagtattgattatgtcggaggcagggtttaatgattgacaggtcatgtgactgggtatagtattgtactgaggaatgctgattaggttgggtttatattaaccataccagtctatatcacatactttaaaagtgctgctctggtgccagaaatttattggtagtcattgtgaataccagaaattgaaaatacaaagcaggaaatttggtttgtgaagtctgtagcttttgtttaagtccaaaggtgtggcctatctccaccagaggtctcccatattttactgttaatgtttgaagtatactggattcccacaagctaattaaaaatcagcctgctatgccggtaagcattcagtctgagaactaatttctgccaaacagccataaatgtgtcccctggtatgaaatttagacgttctttcccatcagaagataggcatgtggtttagtctaaacctcttaatttgagaaacaatgaaaccaactaaagcccacctagaaaggtcataccttgatggaagccacagagcctaagaggcagcacactgggctgctggcccagacccctcaatgtccctaccagaccgtcatgctcttgctgggtaagctcactgtcacctacctctgtgccaggcactgttctagctctttccatacttccctgagacctcattgcaacccaacaggcagatcctatgactgtctctccattccataaacccttttcctatgtacatttagaagaggaaatgggaaacagtttcttcaagaatcttccacacaggacaaaaggaagatgtatccccatgtgtccctttaggaatctgaggctcagacaggttacccagagctgggaagcaccttcctcacctagaaaatggagagtggatagagcctgaccacatcctcaggaaggctcagaactgagatctcagggtgcttctgaggggctctggtccaagcccctgtgaaaggctgttgggccaccaagcgtgacagcacagctcaggcattcagatcttttcttggaaatctggagtcttctcttcactacagagttaggtaactttatttactcatgctagggctgttttcaaagaggaaattatgcaatgtgctatgcaaatatgccattctgagagcagagcagagataagtgtggtcagcaggagaggatgagtctgtgtccctggtgacaggctgcatgcttcctgataaggggacacaccgtgctctacttggacctcgtttctggtaattgcattttcagcaagctgtctccctgtgaaattggtgctgtactcatgggaaaaacaaggaatgacaattgattccgagagcaccctgctctgtagacctgggcagttggtaggataggggatgctgccctgcttgcattcctggaaatgtgggaatgagaagggtaaagttctcattttatcctcttgaaaaaagtctctggcaactttccttgggggaaataaacacagatgggtttttcaggaactttgagaaacttgtttgcatatttgagtagacaaggcatgctaagtaaaaaaataaaaaaataaattaaaaaaaacaaaaaacaaaaaggaagacccacctctggaggaaggtacagctgagccagtccaaacctggacaccgggacaagctgcctgacatcattgttcctggggtattacagttacccatcccagggtagctgcccagggagcaaacaacagatacctatttgtacctgcagatttcgtactaactcattgttcatggtggtcctgaaacacttgtcataccaagttcctaaaggactaagaggtagtatccctactactcctgctagggcatcaaatgggtatttgtgatatgggcattttataagcatcagtcaaagtgacataaaagcccttactggtagagcacttgcctagcatacatgcagcctaaagtccattgccagcattgggaaaaaatgatagaagtgatggagggccatggagatggtttatcaattcaagtgcttgccatgaaagcattaggaccagtgttagggtccccacctccatataaaagctgttatccctgctgctgtccagcaagctggctcattagacaagctgaagcttagttttagcaagagaccttgccataatacaaaaggtgaagagtagtggagaaagatgcttgacatcagcttcatgtgcacgcagatatgtcttcatacatacaatcatacacctgccacacacaaggaaaaatattttctaagtgataggctgcagccgggcatggtggcgcacgcccttagtcccagcactcaggaggcagaggcaggtaggtggatttctgagttcaaggccagcctggtctacaaagtgaggtccaggacagccagggggatacagagaaaccctgcctcaaaaaacaaaacaacaaaacaaaaaaaaaaaaaaaaagaaaagaaaagaaaaagaagtgagagggctagggcgatggctccatggttaaaagtgagttctgctcttccagagaacctgagttccattcctagcacccactcctggcagctcacagctgcctgtgactccagctccaggggactccaacacttccggcctccagaggcagcagcactggtgtatacacacattcaactaaataaatctgatcatatggcacaggcactgtgtgttgaacaccttgggtcaaacatgctgctgtggcttgtttgcagattatctaggaagtcaactttaatccagtgggccatttggaaatcgttcaagcatgcatccaagttgaaagagtctacagtgaacaacacccgtgtaccacctacctgccaccactgactccattctttttaatcacctttctacttctctaccttcagtccccgagacctactggaaatacaattcatatgttaggcaagcactctgtcactaagctaaatcctaaaccagaaataattttataaaacttatttcaaagcaagtttgagaccatcatacacttctccttaaatactctagctctaagtaactggactaccccagtttcatcaacacagctggaagatgatggagcctaacacaaaccttcaggctgtaggccaggagcatacaaggtttgtgcttattcagggatgtgtccagtagcagagctctcataacagtacatgggccagcagttccgcagtgaacaggagtgagtgcaaaggaggcccaaggcagtagtgaggcagctgaagcagcagcaacagcagcccagggggttgctgtagaaaccttgaagccaagctccaagctcaatttcccttggttgactgtgcttcagcaaatagcttgctctcctttacaacctaaggaatacgagcagcacacgttgccccttactcacagagagaagtttgtagacccttttcatcacagagccagtgacttgctccatggctgccccttgttgtgctggaagcttcaaagaagacagagtaattgattgctacttgcagcaaatatcccttaagctgttgctggactgatggagaaatggttacttaattttcttcaaaggattgatttgactgtcaggggaagttctgggcctaagtgaatgtacccattcatctatcactgctgcctaaccatctgggtatcaggaactgtgccctcccccaccccactgtctccaactcacacagacaccctggtagcaatccttgggacttgacaggtctagttcctaccagactcttcttgttgacctgtagacttgctgggacctgggcagccttgtcactccagcctttctgagttccattaggaccagccaggcttccggtaaggggctcactgactcccacagaaacacagtgggaacaacttctgtccatctttttcattggagagtggattttctgtgctacaaaataccaactcccttataatgaggcagatccccagtgtcagatggaagatccaaggtgctgtcatggctcaaggtataagagtcccctagaggtaggacttcagcttacctcactaagctttgagtcctagcatctagaaaaaaacatcagaaggtcacacagttcaccctgcttcccagaagacgctgaggagtgaaatacaggcttggactagaagaactgctcccccagtgcagagggaacctaaccctgggcagcctcatagcacacggtagcttggattctcagccttcagggagactgttaagcgtttatgtccatttttggtcatttgtcacctagtgcagccagccagcaccccctgctagtccaggctgggggtgccccttctctgaaggaaacaaggcctctctggccgactccagggcctaggatcctaggcttcagtcagcttgcttaggcgagtgggatggttgggctgcatggcaccttgggctgagtaccttgatcatgtcctctgggtgtccttgaagaaagaagttatttaacttgaagttcagtttttgtttgttttcgtttttatgcagttcaggaatgtgtcaaagcagcagcttgaggcctggcatacaagggcttttgtcattagtggaagttcttgagacagaggtcttttttagactattttgcatgtgagctttagagaacattcataactgggaatggaccggtgtccccacaccagtgagcatcagtgaccctccatgtctttacctgccttgtgctgcccatagggccctgcagagaaattgagtctgcttagatggatgtgcaaaggagaccagacctaggctttagaatcagagaccttttggtgtgctaggatctaggaaggctagctaaggccctgcagtcttgcaattccagatgcctacttaaaagagtctcattaatgatgtgttctgaaaacgcatccaaattcctacatcttggagatgtacactatattgctactttgaaccccagtcttggcctgcaactaagggtatcagattgcagaattccagagtgtcctagaatcccactagcctagaaatcctgctggaaaggacttctttgattctaaatgtagccagagccaccaatgccaagaattaaattatgtactggcatccatattgtattaggaaagggtcatttaaatacagctaaagtcaatcagccccatttaccatttaccactctgtaacaagctacagcctgtcagaggagctggggaagaaagaggcagcccaggggctggggagagcagtgggttgagaatcccgggtctccagtgggaatactggtagacttgagtgtccctccatcccatctccaaatgccttttcagagtcagtcactgcctccattcatgatctcctgaaggggcaccagagaatccaacaagcaagggtctacatccttggggctaattcaacaaggatgaaggacatggaaatttcagaacaaaggtcattgaggttggttaagatgtgactggagatgggcacagaaaagactatgcctatatagtcgctgtcttcacaccagaagagggcatcagatcccattacagatggttgtgagccaccatatagttcctgggaattgaactcaagacctctggaagagcagtcagtgagtgctcttaaccagtgatccgtctcaccactggctgaactcttaactcttaactgaggatggccttgacttctggttctcctgcccaagtgctaagattctaggaacacaccactgcaccaagtttcatgcagtgctggagattgaaacgaggacttcctacatgctaggcaagccggctcaactgacccacatatccagccccttgaatctgtctttcttagtgggaaacctaagactcagtaggaggcaatttgccaggcgtgtcagtgttactgggcagcctctatggccctgagccccagtctctttctaataggccaggtggccctgaatttgtacttcatatgatggtgcctatgcttcccccccccctcacatatcttaaacttatattgggaaatggttgtgcttttcctgcatccgacttaaaaccataagacctgggcgtctgctcagtggaagaatgtttacctgttgtgtgtgaagccctgggtttggtcacctcctttagaattttaagtgggactgaatatagcacaaaattaaaataaaccactattccaattcttgttgagtaatgaaccttcttgtagcttaataatttaacacaatggcagtcattcgttttgcccatagctgcccatagtctgcccagggtccaatgggaatttcttacctctagtctacatggcatcagctagatgtctcagggggtcattggcaggtcaagtgaggggtggggatggctgacagtgggtctgaaccttgatggagagcttgccagagcattctgatggccctacatcagaaacttgatagcatcattttactggccctcagatttaaggaggaaaaaaatgtagattttgatcggagaatcaagtcacatcataagaagagcaggtaaggtggccattcttcgggaacatagtctatggggaagtctgtgtcagggcttcttcagtccattctagtacataggaagaatgcatcaggctggcactggtttttgacttggcttgggctgttttatttctgtagcactgaagatgaaaactaaggcccagtggatgctaggcaggagctccacaactgagccacatccccacagactggcagagtttgagctaagactcctaacttttttttatttcccttctgataaaaagagcaagcatggcagaacatggtagagcatacccataatcccagcacttgagatgctgaggcaggagtatttagagtttgaggtcactcagagctataaaattctgtctcaaaaatcaaaaacaggcacctggggagatggctcagtcaagtgatgtgctcgctctgcaagtctgagggtctctgtgtggatgtggatgcctgcagcctcagtgctggagtccagtggagtgccctggaggacgcctgcagctcatcagccaggcaatctaggccatcagtgggctcaaggttcagagagagacatcatctcataagaaggtgggaagcacctgaggaagacattcagcatcaacatgtggcctacacaccacacacacacaccatacacacacacaccatacacacacacacacacacacacacacaccatacacacacacacaccatacacacacacacacacacacacacaccacacacacacacactacacacacacacacacaatacacaccatacacacacacacacacacacacaccatacacacacacacacacacaatacacaccatacacacacacacaccatacacacacacacacacacacacacacacacacacacacacacacacacacacacacacacgaaccatacacacacacacacacaccatacacacacacacaccatacacacacacacacacacaaaccatacacacacacacacaccatacacacacacacaccatacacacacacacaccatacacacacacacacacacacacacacacacacacacacacacacacggggctcctcatgcacagtctccttcctttctccttgtctcctttctcttcctttcttatcccctcatctttctttctttcttttctttttcttctttccttcctttcttttgacagaatggtttttctacctagcccaggctgactctggactcttaattctcttgcttcaccccaacccccaacattgtgtggactgcaggcaccagccacaagccagtcactttgtagtctgtgatagcagctgctccccactagacagttagaacacttcatgtaagccaagtccccccacagctgatgcttccccgtgccagcgtgaccttgagattttcacactgactaaaaggagcctcttttactcaagttctcacttacttctgaacgtctgagtcctcacaagcccagaggtggccttcagcatccctggcactgctcttggcccactggggtgggggggaaatgctgactgtttttcttgggaacatagcaatttctgggtcataggatgtgaaactttcggttttaatgaagagtgctactttgcccttcaaagcggctatgttcatttgttctcctcccggcagcctttgagaatgccagcatctgtgtgacctcggcaacacctgatactatcaaactctcttcctactgccagcccaagggtggaagatgttttacttttgttctggcttcttgtgagggcaggcacccttcttgtgttcactagctgtcccatctcctcatctgtgtccttcactgccattacatggttcgtcctgtccacttagatcacatgggtaatcttgaatattgttttctgcagtagcttggtggttggtttgtttttgagtggtgtggccccagcccctttcacacacatacacctagcataacttaacttgaccttgcagtcctcctgcttcagcttcccatggggctggagtcacaggtgtgagcatgctgttatgcctagctctttcagtattttgtacttatattgcttacagttattgacgtgtgtgtatatgtgtgtgttcatacatatgtcacaacatgtgagaggaagtcaaagggcactgtatagaaatggttctgtttgggctggagagatggctcagtgattaagagcactgactgctcttccagaggccctgagttcaatttccagcatccacatggtggctcacaaccatctgtaatggaatccgattccctcttctggtgtgtctgaagacagcaacagtgtactcacatacatgaaataaataaatctttaaaaaagaaaagaaaatgaaatggttttcttcttctactatgttggtgctaggggttgaattcaagtcatcaagcacttttatccccgagccttctggccaacgcagtgtttcttaagggaggtctaggtgcagcccttctgcagtacagtcaaagaggggtccaggaaaatgaggtagatgggcactgagatctgctacagggcgtgctagagtgactggaagacattgagtcaccagcactgagcactctagagagccatacagggaaggaagctcctgaggctgccatccctagggcaggcagggaggactgtctgccactgaaccccacctacatgccccatccatcgcagcacctcaacacaatggtgccctgtcttctgactcccaggacagcccaaacctactctcttaaaagattcagactctgggcaaactagggttccactcagcagctcttcaggttcctcacagatctgagacctccacgtgggaatgctcacagcccacacttggggtagtctagctgggacaagtgactcctgagagcccacgtgcagatcactccaagccagtactcactggttttcttcccatcataaggtctctggactccacttccttccatccttgcctgtcccactgctccctcccctgcacactgcactctatttcttataacccccactgtcttcatgggactctgatgtctcagtgacatctctgaaagctgctccactttggggtctgtccttcctcttttttttttttttttttgtttgtttgtttgttctttgtgataacagtagtagttctttttccctgaagctcctaagatagctcagctccatgagccccaccatcccccaaaagccccaagtcaccatccttcatgatagctctgaccttcaaaccaggtctgtcacagtgcaagggtagaaaaaagatgcaaggtcctgaaggaggaggaaggaagagggcagggagagaaaatgcagtggccgagtttgggggtctgtggtggtattgttgtttgtttgcttgcttgcttgattgcttgattgtttctttgttttgggttttgagtattgtggtttggttggaggggttattttgtgttactttgctttgttttgttttgctttttgagacaggtttctctgtgtatccctggctgtcctggaactcactttgtaaatcaaaatggcctggaacccatagatccacctgcccctgtccctgtccctgcccccacctcccaagtgccaggattaaaggtgtgcaccacaatgcctggctttgttcacattttttaaagtagaagattctcactgaggaaatattttaaatattgagtaaaggaaataaacttcacctcttgataactaaaaagacatgaaagccatgcaatatggaatttaaattccaaggtgcagaggactgggagggtggtacagtacttgccctgtaaacattaggactagtgtcaaatgccctggatatgggtggtgtatacttatgccctgaggaggcagagatgcatggatccctggaacttgctgaccagacagccagctatatttactagccccatattccagtgagagaccctgactacagaaacaaggtgagtatctcttggagaatgatacccaagcttgatcctggcatacacacacactggcatacacacacacacacacacacacacacacacacatacataccaccaaaaaaaaaaaagaaagtaaaataaaatccaggtcaaatataagccagacctagaggctcaggccttgaccccagcacttgggaggcaggaagatcaccttgagttggagggcagggtaggctacacaatgagtttgaggatgaaatagaatataccaagactctatctaagataaagttacatatccctgatcagaaagctaggatggaaatagagattcttgccataggtaacaagtccaggcaatcgcatctatttgagctgacattgcttcagggactgcgactgtcctgagtatcttattccaaagaagagatggaagcataaagcctgttttaaaaacaaaaacaaaacacagggaaaacattctggaaacatttcacacagaagctaggttttcaggcaacttatacctcaaaggtcccacagaaactattctcctatggtggcctaaagagagagaagagggaggttcctctcttgtcctcaggccacttagaaagtggcaaacatgtgtatagggtacaatgccctttagacaatacccaagttcaagtttgttacatttgtatttggggctagactgtctgacctttgttgcctcgccctgggtgaggagacctataatctctgtagaggtacttttctcacattgcaaagccatgaaactacatggtctaccctctcttttatttaaaattgtaatatttcccactgtcatagcttataaaaagttttggcctccacctgaggggtggtaagcacacccaaacctggatagaacctcacacatactcacctctttgctattgaactacagccttacctaacctcacatgagcatagtctgtgtgcatgtgtcctaacaggagtcaaacctacaaccttgtgcttgttaggcaagtgccctaccactgagctacatttccagactcagtatgatttttaccttagtttttgtattgcacatcttaaatactctctcatttaaaagtcatttctagcaatattgcattatttatacatgtaataaaaacatgctcaggcatggtagtccatgcctttaatctcagctcttgggaggcagagactggtagatctccacgagtttggggccagcctggtctacaaagcaaattccaggttagttattgctaaatagtttctcaaaaataaacaggggtctggcaagatagctaagcggataaaagtacttgcagccaagccctgaagacctgtgatcaattctcagagcccacatagtggaaggaaagaactaactctctcaggtctccctctggccttaacacacatgtgagatgagtgtacatgcaaacacataactaggtaaatgtaataaaagcagtgatttttaaatgaaaattcttccattgattttagccctcccagccccccccccaacatactccattcctatgtcctcctcacagacagccattgttcagagctcagtttactttagtgttgttatatgagtttgtaattttacatctgatggaaaaaagtcaaggtcaagttatttccccattttgggacatttgtggattttcttggtttggctatctcattgaaagcataaatgaaagaaggtgtcactgggcggaactcagagtggactgcaggtgtgactgatggcttgtgttgtcaggtaacttcagagtcattggggacaggtctgggtataaatgtcaagcaggagaagggacctgggatatgctcaggagccctacgtgtactgcttcacacgagtaccttcctagcagctgctgttttctgtaccaattatcctgagatgagggatcttcctctcattctacagatagagagccatggctcagagggctcaagggcctggcagatggtcacactccacctcgttcagttctgggttctaagttgccagacactgaattgaggacttgtggtgctgttgtagggaacaggggatcttgttttcctgacttcacatgatcaaaaaccatcatatctgtaaactacctttggtctaaaagaaacactaaaatgttcctgggattggctgctgggtgatggtagtggctctggggctggggatagaacaccagcctcatgcattccaggtgcttctacccctgaactcagttgttagctattttcacactttagtgtgtatacaatacctaatggtttgtgtgctttgtatcagtctcaaagccatcaggattgctttgagaacacactgaatgtgaggcttaacgagatgaagggactctcctagcagaagtggctgaagaggcatccaagcccagttctatatgtgaagaaagctggacatctgagctaggccttattccactctccactctctcctcccagataacagtgacttgattgcatgcacagtcatcaccaaggatggtggtatggtccagcggttcctggctgtggacatttaccagatgagcctggtggagcctgacgtatccagacttggctggggagtggtcaagtttgctggccttctacaggtgagagtctaagaaccccactctgttttctcactctgcacacatgcatggtaaaaatgtcagttttatactcacttgtaatggcacaagaagtatgcacacaaaaccggagtattgcacagagaacagccaagtcccttttaccaaaaccttaatcttaacacctctccttcccttcggagaaaacccattgccaagctggtccttccagatctgcttcactgccaagagctttttaattgtgtatccatggaactgtcagttaaactcagtggggaaggaccacatggttgtacatgatctcagcattcaggcagtagaatcaggatggcatccacaaattcaaaaacagaccagtctatttaataggttccagaccagtcaggtaggttcatggagcaagacctggtctcaagataaaagggtgttgggaatgaggacagtgtgctgggggtgaaccttagttgatatggagtgctcacccagcatgcatgaggcccttgattccattcccagcagcacatacaaatgggtataatcatacatgcctataaggaggtggaggcaagatgatcagacatttaagggcagccttggctacctaaggagtcagaggctagccagagctacatgagaccctgtctcaaaaaacaagacagaccaggtatggtgatgtacatctttaatcctagtacttgggaggcagaaatgagcagatccctgtaagtctaaggcaaatatggtctacaaaccaaatcccaggccagccaaggttacgtagtgatactgtcgcaaaaacaaacaaacttcaccaagaaatatgtctgctataaacatgtacagactttcttttgactctttagtccctaaacaggtatttacatagcacatatatggtatcaagtcttatgcatcatctagagtgaatttagagtctacaggaagatatagtaggttatatgcagatactgtaccatttaaagtaagggccttgagcatctacagattttggtccccagtttggtagggagtgccaagggttaattgtacatgagtttgagggtatgttagattcttatgccatatcgtagacttggcctatctcctagcctctcttggagtgtctagccattttagcagatgcatgcctgctggggttctcttaactgctgtgtggcagggcatgcttggccagagcgctcttgataatcccagcttttcaagcatgtaaacctggtgttccacttcctcatgccccgggcaggatttccctaggcagatacccaagaagttggaatcagctattttaagagttcatagcttctgccaacttcctctagcactgttgttatcacaggagttcctgagcacaccctccctgaccaggctctacagcacctcgtgtctgctggggctctgtcttacaggttgataagtatgatggctgagtagtgactagctgcagagggaatgaaacacagatcccacttcctctctctactgtgtcctgtcccagcctggggctcccctcccctcacttcaaggaggtccatttcctgctgcactgctctgattcccagaagaccttgcgcaggctgagttgactcctaaccacagcggtgggcagcccattgttgcctgctctccatggggagcgcctgtacatgaagccactgctcctgtctcctctccttcccacactcctccctttccagaccctcttactctcagtgagggtgtaggagaatcttttttaccccaaagtgactcccgtgtggaacactgcccggtagatggcctgtgcatcttcttatcaaggtacaccaatttccttagaacacaacatcaggaaagtgtttttctctctcagacgcttaatgtgtcagacaatgaaagccacactccccccccaccccccatcctcttttggttctcttccagtagctactatttatcagactgttactacgcaccagatccttgctttaaactcataatagctcatcttatctgctgctgccctgtgatgcagccattctttccaaagggagagccaagtgtgtggcctccaagcacagcagccccttccttctgaaccttcttcagtggctcccacctcctctagcatatctgacctttgagtctatcttctgtctggtacgcttttatctcatgtgcccttgaacctttgtgggcacagacttgacacagaacccatcctgaggctttatgggaaccagtccttacacactcattcctcgtcaatgtctttatccctttcacatgcagcttgcctgaagtctctgccaaacaattctagtggcccttcctcagggactgtcctcaaagatgtaccaaaggacaggaacaatgcctcattttgaagagaaacaaggaggtagtgtttaaccaggtgacaaaaaaaggctttggagttgtggcctctggttttccagaaggaagaattgttggaatttgcctgttgtgacagtggtggcccttgaagaggctggtgtacctcttgtggtcaggcatctcaagtcctcatggaaaggagaattagccatacatccagcagctgattcctcacctgtcaggccgggactgatctgcatcacccttaaatctttgagatgtagcctccttcagaacaaaagcagatgcaaagtgctggtgtctttctatatgagccactgacacccctatcaaccctgggcctgatgaacattttgcctttgccttctcgctctgcaggacatgcaggtgacaggagtggaggatgacagccgtgccctgaacatcaccattcacaagcctgcctccagcccgcactctaagcccttccctatcctgcaggccaccttcgtgttctcggatcatatccgctgcattattgccaagcagcgcctggccaagggccgcatccaggccaggcgcatgaagatgcagaggatagccggtgagtgacctcaagagcaaggactccccaccgcagggctgtcaccagttcacattgacccagaaacatcccaagacttgaaagaatgggactttccctgcttcccaggtgtttggaagggagacaatcctcagctgctgcgtggaagagaaggggcctctgtaacagacaagaaacaggcgcaggcagggggcagctggcacctcctcttcacgagttagcccgcaagggtacaagggtatagtcacaaagcattctgactgccctctgccatcttaggtatgcaaacaggtcttagatcattgtacaggggaaatttttagtcacacagagaacaagtttgcagagcttcctactcagatttgtttgtttcagctctgaggatgaagcccaggacctcacacataatttttctcaccattctctttgtttccttatcatctcttggtgagccgccagcagccagcacccaacactaaatccaggagtcattcatacctcacagggatggtagagtttgcatcacccaggctttcttagtaaaagccctgaaataaggttgtttcttcaagtcatgaaatggaagtcaaggcattgtcctgaggcagggtgaggcaggggagtcctaaccgctcctttaagactctcaggctagagctgtggctcagttggtagaatggttgctgtctcagtcagggtttctattactgcacaaacatcgtgaccaagaatcaaattagggaggaaagggtttattcagcttatacttccatactgctgttcatcaccaaggaagtcaggactggaactcaagcaggtcaggaagcaggagctgatgcagaggccacggagggatgttctttactggcttgcttcccctggcttgctcagtttgctctcttatagaaccaagattaccagcccagagatggtcccacccacaaggggcctgaaacccttgatcactagttgagaaaatgccttacagttggatctcatggaggcactttcccaactgaagcttctttctctgtgataaccccagctgtgccaagttgacacaaaactagccagtagagttgcctagtatgtacaaagccctacatttgatctccaacactatatcaaaccagttataatgacacatgtctataatgccagcacttgggagggaaaagcaaaagacttacaaatttaaggtcatcgtctactatatagtaagttcaataccagcctggctatgtgagaccctgtcccacagaagatacaaatgaatgaatgcatgcatgaagaccgaacaaataaataaatgaaattattagtgccttcagctcaggcccacagtccctccattatggctgccaagggatgtccagcccactgtgaggaggagcattctctcaaggaacaaaggcagaataagctccctgtgtgcttcatttctggctccgcagttccatgctgtgtgtgcctccgtgatgtgcatcagagttgttcgcccttcttgtttctcacgtagctgaagcctcgcctgcggaatcatgacagaaggattttgtaatgtacaaagtgacttagattattcagcccttcctttgaagattcatttccagacttttccctgtaatgtgaagcactttctcacgctggcataaaggccagatatttcatttgaaaattgaggattgcactgtaaagtggctgctagcatggctgccttggatatttcttaaattgattttgaaaagccactttgaactaatacatctcaagagttgttaagggaagatgatggctatgacatgtaaacacacactcataaatacaaacatatgcttccttgtacacatattctcataagcatctatagcaagattccaccaccaagatatcaaaaactcagaactagggctggggcagcagctcagtcaggtagtgctgctgcccaaccatgaggttttgagttccccagcatccatgtaaaagccaggtatggcagcatgcagctctaatcccagccctcgggggatgaacacagagaacctgtaggactggttgtctagctagtttagcccaactgatgagcttcaggttgaacaagtcaccctgtgtcaaaaaataagataaagggcatgcaaggtacctcaggaagtaaaggtacttaccaccaagactaatgaccagagctcaatccctagaaccaatttggtggacacaaagaactgactcacaagttgtcctttgacctccacacatgtgccatgccacacaaggatgcctgtgtagtacatgtacatgaacacaaatacacaacacacacaaaatagatatagaaaaccctttttaagatggtcagcattgacctctaacctccacatacatatgtacacattcacgcacacaggactctgaaaactaattgaacctctgctgcctttttctctgtgattactccctagacaatataggaagaactccttccatagtactttgatcatattaaatataagtcatctagagatgataaatagtagagaggatatgtatgtgtcatatacagatataatgctattttttataagggacttaattacagattttggtgtctttgtggaggagtcctacagatactgacagatcactcatttgtatattttgtctgtctgtctgtccatgtatgcctgtgcataaactttggggggtagaattggcctcacttgctctaggatctgaaggtgtgtgtaaagccaagcctttgggaagggtcttttctacagattgcaggtactaactggccaaagactcagaaccctgccatcttggcctgagccccttcattgcagttgtgttttgaacttccttagggactctggcatcctgccagtctcacgcctcacgctgtctgtttggcttccccaagggtcttactgtcaaggctggtgtcactctggcctgttgcccaagttataacaaacttcctgtccccattacgcgtgctaagaacaaactatggtgctgtttgcttacagcccttctggacctcccaatccagccgacaacagaagtcctgggatttggactctgctcctcctcctcctcctcccagcacctgcctttccgtttctatgagcagtgccgcagaggcagcagtgacccgacagtgcaacgctctgtgtttgcatccgtagacaaggtgccaggtaagccacacctcctgctagggactcaggcagcttttctgctgagcccgctagaggccttcctctcagaatccaggctattggcagctctggcttcatagagcatgtgagacatacagacttggcttgcccttttttgttctgtcacttgggtttggtttttcagacatctcttaggtttgtgaagaaacttgtcagaatcaatgtttcttggacatttcttgactaattagtgctgagagttgaggatgagagatttcgtccttcatgtaaggtgactaggagctagtgcatacagttcctggtcccctgacaagggaagccatgagtgaggaagtcccagtacccacaggccttcggcttcttccctcttctgcaacaatgtatccagtcctcctgcccttccctaaaagagagattcagtggaaagtccaggggctgagagagctgcttcttaagaagagcagcctccttcctgcttcgacatggtctaagtgtatccatatgcagaaggtgccaccggctggggcgggtgggggaatgaatgactctcttctcttgattgtaaatcttagaaaactggccaggctctcccctgctcttaacccttgcacgttcagggctagaacttatattacaggtattatgaaatattctcaaaagtgattactgatgttggatcaacaaaagccatgactgcctgtccaagtccaacacttgactacctctgatttagtctgctttcacccgtgattggatttctttatttcatgtataccataagtatatcatttttaatccaacaagatttgatagaatgtgaagaagtcccttttgctccagaatatgtgaacagttttttgtttcttgcatgtctttctagaaatgtttgcttgtatgttttatatatatatacatatacatatatatgtctttgcatatatcatgtgatgagttctatgccatgcatgtgattctccattcccctcttgatacttaatctaccacatatcaacataacatcaaaagcataactgtctatgaaattaactctattttttaaaaaaggaaataatgactgtacatttttgagatcttactgcctggcacacagtcaggcctagagtgcttaaggggtagccttctcttggcctctggaagctcatcagtcaccttggagagaagcatacagaggcattgccctggggcagggtgaggcaggggagtcctaaccgctcctttaagactctcaggctagagctgtgactcagttggtagaatggttgctgtctcagtcagggtttctattcctgcacaaacatcgtgaccaagaagcaaattagggaggaaagggtttaattcagcttacacttccatactgctgttcatcaccaaggaagtcaggactggaactcaagcaggtcaggaagcaggagctgatgcagaggccacggagggatgttctttactggcttgcttcccctggcttgctcagcctgctctcttatagaaccaagactaccagcccagagatggtcccacccacaaggggcctgaaacccttgatcactagttgagaaaatgccttacagttggatctcatggaggcacttccccaactgaaggaaaatggtctggcagttctcagagagagggggtgtcttactgttctcaggctccagcatatacctggagaaccagtgctgtgccctgtctcagcttttacaccagctcctttatctaggacttgagtgcccacctcccattggtggcccaaccccaatgtgtgggctccatccttcaaaggccttttattatcatgctgctgaccagggccaaacccttcccctatgacattgccttggtttattttctccgcagaattcagttccttgtcaggttgtaggctggggtctggttcatttgccccgtggagaatgtcactgtgtggaactgttctgttcaccactctgcttccgtgccagcggtggcttcagtcagtgtttgtcaagtgcagcataagcctgcatttgcttctatcggaacaccgaaaagaccaggatatcctatctaggacccaggcacctgggggtttggtctgcctagggaacacaggaccaggacccagctcttcagcagcaccaccaccaaacttcagttgccaaaccagcatgtgtccccaagcaggaggaccctggccatacagagttagggtgacttcaggttacagaatatgtccccaaccctcaccacctgggtcagctttgcagaagccagagtaaggagagtcaggtggagaccattggctactcttcagcattcacagctgccttctggggcctgagttccatgtgtcccttgtcaccttctgaaatgacaggtgttgactgtggggattctcgccgatctcagggctcacttgattgggatacgtctttcctttttgtttgtatcccaggtgatgcacacaggcaagtgtgactctaaatttgattatatttgatggaagtgtgcctctctcttcttgggagaaagagtaagatggagtataagccaggctgaggggttagcagctagccgctctaagtgtttggatttttgtttgtttttgtctgtttggctaagaagttacaaattctgtttatcttctgctctgtattgatggctcttgccaccccgtgggcagctttctagggcagagaattcctagggagggaatagcagtggtagccaggatggggcagcagttacttgaggagtgccccaagccctcgtggcagtagctgcttccagagtttgccatggccagcaggatatgctcagcacagccttgaactggtgccccgagcagaagctcttcccagcagagctctgtgcttaagactaagttaattctttgcatggatacaccacatcttgctaattcagccccgccccgccccgccccgccccgcccccacccccactgttgtaactatgaacctttataggtttgcaggttttaacttcaaagcatatgcctagcagtggccaagtggtcatttaatgttttgagaactgccagaccattttccctcagtcttttcaacccttacctttagctgaaattgaggttaattttccccttttgcaccatggccctgcattggaatgagaggtacatggagtgacctgtttttctaggcaatgcacaggtctgccttcccaccagttggtctggctctggtgccagcagagtcacacttgatgctgttaaaaggggtcctctgctctcctctcttcctgccccagcttcctgccagtgtgagcatttttatgccttgaggcaggcatttaaatcacagaggaggagttggtgagatagctcagttggtaactacgtaagcagtgaggacctggggctgtgcagacccttgaggctcactgcctatgcaccctggttttctcagtaagaatggtgccagggggaactcctgtcgtaaaagggaaaaataaggatggatggtgcccgaggaacatccacaggtgtgcacacaggagcatacacttacacacaaatctccaggatctggggagggccgctggcccaggtgctaccaaggcaaacccagtcttatcagttgcctggcccagaacacttaatagctctctgcaacagcctgccattccaggacaacaatggcagctaagtagcccaggaggaatgtaagggtgccgagctggaaggtgccaagtgctgggggcctggcaatgagctccagagaggaaaagctaacaagcagagtattaagtattaatatgtgggcatcagccttgactctccagcctggggacaatatgcaaggcgctaatgtcctcttgggggtgtttctgactataaaacaaagccagctctcttcttccagcttcccaagccagaagattgtttctgagtcacccaggaagggggcctgccacccctcggcctccccagctgccctcagctccctgtgcagactggcctgggccagccaactagagacactgattcctaccctcctttttagtgtagcttttacaaagcaaagtacactgggctgctgggcagttgacaaattattttcctctggtagtcccaatatttctgcttccctctctgcatgtgtagaagtaccctgcacaaggccataagcctgactaaggtcaagtaacataagcaccacagatgctacagcaagtttctcttaatctcgcagcatgacacatcgaaatgagccatcctagcctgcttttagaaacaaaggcctaactactgccacccaaggcctcttgctcccaggcacattgccgggtgtgtagtacatactggtactcccagcacactagacacttggccatgaggattgagaggtcaaaaccagcctaaagttacatggagagaccctgcctcaaagattaaaaaagaattgcagaaatcctgtctatttctggaagtataagctctgttggggaaaattgtctgtatctggcattttctgtatattaactctcagttccagacagctctcaaagctgagtccctgccctactctcaacattagaaactgagatccagactgggacctcccagctcacaggaagcagacgaagcctgtctctaacccgtttgcttcagtttgcttcaaggctgccttttgtgaaggctgcaccagctcacatggttttgctacaagtctcagcatgacagaggttatagattaaaccgtttttagagagcagcctcacaggtggttgtggcttagggtatactggtccccataatctacacccccacccttgcatagacccaagtcttgtgctttgagacctgtctccaaaggatcaagtatctgaacaaagatactgttcagaaaaatgctcttccagactacttcttgaccagactggagggcaagctcacttgcacaatggtgttcttggcccacataagaaagaacagaaacgacactggaattgacctcaacaaacagcagcagttgagcgctgacactcatcagtaagagactgaccttcaagagctaggctgggaaccagggggatgctcagtggatgagagcacttgctctgcaagcaggaggacctgagcccaggcgtggttgtgtgtaccacagccccggcattatggaagacacaagggaaccccaagagctccttagccagtcctcctagtcaaaatgatgagcttctagtctagtgagaaacccctttccaaagtaataagacagaaaatgataggcagtgacaaatgtcgtgctcatgcctccatatttatatggcatccaccacacacaaaggaaatcgagtcagagtgggtgtgactgccaccaagaagtcagctggtggttcctggcttgccagtcctcttttcaaggtgttagggcatccatgaacagaaggcttcagaggctccccactgggagcccgcccacgtggaacatgaccccaaagtgtctgagcagacaaaggagcagttgctctatataaagccctgtaaagacagagcccagccacccagcagagcagcctccaggcctatgcctttcctcagaggtagagggagggaggggctgagttctcaagaattgaatgttgctacattgctcaagggcttgacctacttcagggctctggggtgactgtgtcctggagctctctccaactgaacccaagtcattggtgtgggaagagaccaaaaccctgtacctcacatgtgaggctttgcctgggaaggtttgggaaataagcctctgtgacagggcagaccagacaggtccatatcagcattgtggctctgctactcctgtgtgtgcactgaaccctgggagccagaggcctggcttctaattcagcctcctgcttcaccttacacttgctacataacactgctgacctgtgcaccttagaaagagctagtaagaaaatgtgtgtgtgtgtgtgtgtgtgtgtgtccccacaattgaaaacataaaacatagtggcacatgactttagtctcagcaggagcaagtagatcactgagttccaagccaacatgagctaccaagtaattaaaaaaacaaaaaccatgaaaggcagatgtcacctatctccgtaggttcttgtgtatatatccatccatccacctgcccaaaatgcagctactttcctagcgtgggtgacatgtatgacgagtaaactccatcatccaagaccctgttttgtggcttcttcctctactcatgagacaactcaatgagaaaagtgcttgacacataaaagcacagggacccaagtgtgagctccagagcccaacaggagggtgtttgggttcaactgtagcgcttaacagagtgggtgaaattctataccctgatccagaagaggtctgcctaagagcccatggcttatagaggaggtcaggccagggccagagaagagcagggagtcaccatctaaggctactcacaagctctaggaatcagtcggccagtgggaaatccgcagtggggaagagggacactgcgcccaaggtcacccaccttctgggtggccagccagggatttgaactggagttgactgcttcccacaccccacaaagtgtgttgtcttcagttctgaggatgccaggtgacagaactgcaaggagccattgtgctccaggtcccctgagctctctgtggctgcactccactcctagtgaaccaagagctggagaggagatggcttgtgtggagacaggtctgcatctgaaggaagagaccctgagaaaagcatctggagaaacttgagttcaccttgtgtagggagtggtctcgtttgttctgtggctctgataaacaccaaaccaaaaagcaacttggggatgaagtggtttgttttatctcacagtccagaagaagaagaagccaaatcatggtcctgaaggatgcctgcttactaccttgctttcagtcacctctcctagacctagggatggtaccaaccacagtggtccctcctgtatcaattagcaatggagaaaatgcccacaggccaatctgagggaagcaattcctcaattgaggttcctcttcccaggtttgtcagatcgacagccaagataagccatcacatgcgtaagataacatgagtgtgtagtggtaacattgtggaggtcagaggtcagccttgaatgtattcccctgaaaccatccaccttgttttgagaaagaatccctcactagaacttaacttgctaattaggccaggccagtggccaataagcttcaaggatctgccattctcccagactctgggattcccagtgtctgctgctacacccagtttttaaaaatgctggttctggggactaaactcagattctttgctaatcgagctatcctatctctgagaaaatgattcattctctttcttttgatgtttacttttgtttctgagtcatcttatcaactgctgattgtcattagcagataattgataacacagacaaaaaaataaaagtgtgtttgcagaagtagactgtcctagcccttgcttttccaagtgaatagatgaaggtccactaggatttagtattttgcctcagatgttctatgactagcttaaggaacttcaggttgccttctgaaacaggagaaaccactttacagtttcccaagaattagccacagtcctccgtttgccatctgagagattgaatctctgagtaagtagtattgctgaggttgagacagctgggaggaaagttaggtcattcacaagaactcattaagagtaaggaaaaaaatagcagacagatgtggcaataacagtgccaaaggtcaggcgtggggggaggggacagaaggtcttgactctgacatacacataaaggaggagaccagcaggttttgaagggatgttttaaattctaaagaagacctgtctggggtcttcacttactgtctggggttcagaagggaagaaccaagcctctaagccagtgtttaccaaatgctgggctgggcctaaagatacaggtggcccagatcagatcagggaggcccaccctcaccctgggacagagaatgctctgccaggacctcatcaggcacaagatggtgcctgccaagaaggggtgaagaaaagactggttgagttagggccagatggcaagggctttggggacctgttgaagggtcagattgatcctgaagccactgaaacatgaaagtgtctaaggcagcacaggatgcaggacaccctggacttggccttgatttgcctccagctgggaagcttgcacacttggccccagtgttgcttgctcacacctggacaataagggcccgtgcacactggacaataagggcctgtgcatactggagtgatgcctctggtgggagcttttcctgggttggttgccctcctcctcctacagcttccctgtgctacccatcacctgcactctaggatggctctgacttttaaaacagcttcttagtaaccaaggttggccttgagttcacagaacgccaatatagggttatattgctttttttaagaaacctaagtgccctccattctcactcagccatatagcttagaggttttctttgagctccctcattcatctagacattcacagcccatcaccaatgtcctatgggtagattcctaggctgtaggcagctttttgcctttcaacagatagtaggcacctctgaagactcttgcacaaagctttgcaaggggcagtgacaaaaaactcaaatcctcaaaagattggaagtcagaattacccaagtgtgacaaaacgagctgttttcacagctttccttcacacttaatgccatcttcagctcggggtgagaaacacccccaaactggtcagctggttccaacactctgctctgcagtctctgtgagccctgctggggactcaggacacaaaaagccacctattcaggttccatttgaggagtaacaagataaaaaaaagtacaagccaggcatggtggtacacatctgaaagtctagccgtggggagatggacaaatttgtgctagacactaggctacctatataaaatgaggagagaaaccgaggtgtggtggggattagccaagaaccatcttaattccatgggctgggatcctggactgaaaaatggagaaagctagctcaagtccagcattcctctttctttgctccctgactgtgactcctcctgcctcatactctttcgccatcatgattcacatgccatggtggacttgaaactgagccaaagaatgccctttcttctttcagttgcctttgtcagggtatttttatcacagcagctagaaacatagttaaaacatataactttattaatcgctcactcgtgcacagctggtccagcaagactcaggaagtggcgcagaggctcagagcaggcctgctgcttctgtctgctgggttcctgggaaacatctgacctcctcctgctctttgttctctttcctgctaagtcagctagagagttctatagagcctctgaggtaaaggatccttctgttgtggctttctcagcatggtgaccgtacaggtaacaatttaggcctccacatacactttagactcttggattggcagtgtcctcataaactttgggaacagccaagtggtaggaagagttcttcatggaatgagccttccataaacaaccctgaacctcatgggaataaatgtgtttgctccttttcccccaagttccaagccagaagcccaagggaatgtacattaggtcagaacaatgcctagctggatggactgactgcttatggttctccctctcaaagaggcctttgagctggccagcagaaagcacccacgggaagtgctgggctcaatagtgtgaagcctaccaccacttgagtgcctgctctgcagaactgcatgtcactgctctgttcccacagtcccctgtccctgccaaggaagccctggcagaaagatgaggcccactccccagagttaggtcccaaatttcagtccacacctgcccacagatactgtgtgacattctgtagatccctgagccttagtgtcctcttctggagtaaaattattgctgtgccagcacctcacagaaccactgaactggggtcataatgaggagagaacccagctcaggtaaagaagtggcacccagggccaggagctctatagtaaccagagcacctggctttatgcctgcctcctccagacagcaccgaagatgctcacaggcttctggccagggttctctggctctgccagccatgctatggcaccatgagggttagcttttcatgtagcacatgtgcaccaagacctcctaaagtctattaaatacatcatgctgaagtatccccatgaggagggtcagcatagtcatggcagcagtcatgcctgagctactggacattgaagacccatagactggagcacagagagaatgggagaaggcagcctccggccactttaaacaggagcaagtggttctgattcatggttgtctaagctccttactactgctagaagtataagggaatggagacaacatgtgagactctggggtctcccagaatctgggcagagttaggtaagggtaagccttctggcttggtagatctagccctgggactactgctggacctgaagctcatgcagcaccttcactgtgacagagtgcctgaagtctcagtcagtcacactaccagaaagaggtcgtgctctcaattctgttccctgcctgccagctgctctaaggtaaaaacatctaaaagtttggccccactggttagagtaacatgagcctacctgcattgctagcagcagcagagtatctcaccacccttaacagtgatcctgagagacagttgctattgctcctctttgagcaggtggggaggactaaggcctcaccaaaagccacagagcagtatatactgttgctgaaaacctgcctggttcatcagctccacaacctttggtgtccagggagatattccagggacaaaccagaggaagtttgggctatgccctggagaagctatagcttgcccttgcctattaagtcctcacatctgactcctgggccagagaagtttgcctgatagatgtgacatgtaaacagctttctctcctactttttctgcagcaaggatggctctcatccagagttcttgaagataatattactgaaaaggctccaacctgcagtggtaaatccagaaagtttgaggactgaacaatgtagtcaaggctttcaggagtggagacttagctcattgcctttaaatccatgaaggggcttctctgaagagagtggagtttgtctttccatccattccctcttcagcaagcattcactgaggacctatagctatcatgtgctggacttggcttaatggctctgccacatgaagtttgccatactgtaactagttagcctataaggaggatgccctgactagtgaagttgatgtaagctccctgagtaggtggaaaggcagagttaacagcagtggatggagaatagcatgtgcaacttgcatcaggaagcctggatggggccaggcccacgtggctcctactcctgctctatgtcctagcctgccctaacagggtccaggtagccaggcatagctccttaaaaatcaagagggtttggcaatgtagcagtacacaccattaatcccagcacttgggaggcagagacatgctgatctctgagttcaaggccaccctgtaggacagtccttggcttgaggccttaggcaggaccagccaagccttatcattattattatcatgtgtgcatagtgtgtgtggatacaggtatgctcatgccataacatgcacgtaagtgagaattagcatgtgcgcagtgtgggatacaggtgtgttcataccatagcatgcatgtatagtcagaagcatgcatgtatagcatgcatgtatagtcagaagcatgcatgtatagcatgcatgtatagtcagaaggcaacttccagagtccgctctccttctcccttggtatgggcaaagagctttagcctgctgaaccatcttgccggtcatagccccataaacttatgaggagagatgaagccacgctgtgagggagcttccctgctggactggaggcttctaggttcttctgctgaccatctatgccccagaatggatagagaagttttcctgagtttcctctatgttgctttacaagaggactcctgataaccatttcagtgacaacagtgactgcactggcctgccaccctagcaccagctgtggctaccctggcacagggcagtgtgtaactgagttccctcctcccattgagctaaaatagctgccttgtccgatagcctcccttctgtacagaactgtgtttcctcacgtatttggcatacaagggagcctgggtattggagtaggacacatagaaaccatagatttagttttagagtggccagctcagtgcaactagtaaactcatcatgggcataattctatatcactctctgttccaaaaaccggggagggggagagtctagaccagtggttctcaaccttcctaatgctgccactctttaatacagttcctcatgttgtgattcacaaccataaagttactttcattgctacttgaaaacagtaattttgctactgttatgaatcgcaatgtacacatttttggagacagaggtttgccaagggggttgcaacccacaggttgaaatctgctggagctgaagatgcttccctcaggagttcacggtgtcctgagaagggaactcctaaaccacagcagcagcagcagtccaggctacactgagatgccaggccacccagggcaggaaggctctaggaaggggtcttaaagaaaaggcaaggtaaatacagtattatccaggaaggaggctgtcttagtcagggtttctattcctgcacaaacaccatgaccaagaagcaagttggggaggaaagggtttattcagcttacacttccatactgctgttcatcactgaaggaagtcaggactggaactcaggaaggtcaggaagcaggagctgatgcagaagccatggagggatgttccttactggcttgcttcccctggcttgctcagcttgctctcttatagaacccagactaccagcccagagatggtcccacccacaagggggtctttcccccttgatcactaattgagaaaatgccttacagttggatctcatggagacatttcctcaaccgaagctcctctctctgtgataactccagctgtgtcaagttgacacaaaattagccagtacaattgacctcttgtcaacttgacacaaatacatcactagtaagcctcaacccttagttcttattcatccccaagatcttaaataactttaaaagtcccacagtctttacatattaaaagttcaatccttttaaaatatccagtatcttttaaaattcaaagtctcttaactatgggcttcactaaaaaacttccatcaagagggaaaaatatcagggcacagtcacaatcaaaagcaaaaatcaatctccaaccgtccaatgtctgggatccaactcacgatcttctgggctcctccaagagcttgggtcacttctccagccatgccctttatatcacacgcatcatcctctaggctccagatgcctgtactccactgctgctgctcttgatggtcatctcatggtacttggcatctccaaaacactgcatgaccccttcactcctgggccatcaattgcaactgaggctgcaccttcaccaatggccttccatggcctctcacaatgccaagcctcagctgttctgcgtgaccccttcatgccttcaaaaccagtatcacctgggtaactcttacacattaccaagtccaacctcagcacatgatacaaccttggctatctctggaacacagcctctgtactctcaaaaaacacttcccagaagatgtcacctcaacgatgctggtgtcttcttaatcacctctaatttcttagttccagctaaccagcatcaatagtcccagtaatgcaaaggttttactttagtagtttctggtatcttgttaaccacagctgattcttcagccccagctaagcagaatcttcacaatccaaaatagcaatggccctaaaaagagtcttttaattttccctctgaaatttcacaagccaggcctccattttactgcactgttctcaacattatcttccaagctcctacacaacatccgacagagctcttaacagcgaatggatcttctggcccaaagttccaaagtccttccatagtcctccccaaaacatggtcaggttgtcacaggaatacccgactctgctggtaccaatttgtcttagtcagggtttctattcctgcacaaacatcatgaccaagaagcagttggggaggaaagggtttattcagcttacacttccatactgctgttcatcaccaaaggaagtcaggactggaactcaggcaggtcaggaagcaggagctgatgcagaggccatggagggatgttccttactggcttgcttcccctggcttgctcagcctgctctcttatagaaccaagactaccagcccagagatggtcccacccccaaggggcctttcccctttgatcactaattgagaaaatgccttacagttggatctcatggaggcatttcctcaactgaagctcctttctctgtgataactccatctgtgtcaagttgacacaaaactagccagtacagaggccaagatatgacaaccacatgagttgtcagaaagtagcaggttgatgcttcacaggagttatggcaaccttcctgaatctaagagctttaacctgtggaaccatcttaccagtgaaccactggggccttcaagagccaggctgacagtcacaaagcttttggagcaagaaaataattgactaccagggccagtccacgtcaggctgtccatgatatagaccagctggtgtctggatctactgattggacataggctcaaagctgggcatccttaacgtacccacctgtacttgtctcgtaggtgagggccaagttttcttttttattgtgtttgcttatgggggcatatgatgttgttgtttgtttggctttttattttttgaggattttttttttttttgagacaggatctcactaatagtgatccctggctagcctgaaactcaatatgtagaccgggctaaaccttgactcagagattccatgcctttgctctttagtgctgggattaaagacatgtgtcaccattgcaaagcagctgtactggatagcctttatccagcatggatgatggctttctcataaccacacaggtagaaccccccttacctaggctccccacaacctatatattctagcccctcctaagacactcccccatgccataggcaacaaaggcagcaatccgtacatatggctaggaggagtggccagattctcgggcaagggtccagtgacccttccctgccttttccttttagaaggagaattcaacagtctataggccagggaagccccttcctactcagcattctccatactgtttcctcatcttctcccctccacatcctgctcaaaccattacccagatgttaactgtggaaggcagatctgggctttggtgagtgctaaattccatctcctagagtctaggatctggactctatcccaggcatctaggtggtgcttaataaacattggatgggtatatagatgcatacactcacatagaggaagatgggtaggagatggatggatggatggatggatggatggatggatatgtaaaggaggtggctgggtgaatgaatgaatatggagggaaggagcagcaaaactttaatactccattgtatattcccttgtatgtgtcagccagtgttcactggggattcaggggaaagccaagcagatcagtccctttggatcatggaggctccagaactgcctgtcataatcagtgccctgatgtgctgttccaagagctggaataatattcaggaaagcactgttacctgaacttaagattcagaaaagcttctctaaggagaaggatcaaatctaggcaacatgtgtcccagacaagggaagcttggcccataggctgcctggatccctagtaatgaaatgctcactgcttatgctagattccaactcctagagtgtagaaccctagactgtgatgctccacagctgtttggagtggccagagaactccctttgccaccactgtggccagaaaagctggcctgaggtgattgtcagtcttccccttcatccaagagcatgtcagcacctggaatgttgttctgtgttgaatcctgttgggaggaatgttcctgggctggacctgactagaatgatacacaccatgccatgtataagaaagtgagcagcaaagcaggttgtagggttgagaagggcttgcgtgactccctcagagagatagggtacagtgcccttcctccctagaaaaagtcacatcaaccctgtgagtgaaagcccctggatggactgcagtggggacattgaatcagttagatgtagtggataacattgtatcagatggatacagtggcatgctctggttattccagaactcaggagaggaggtagaaatgccaagaacttaaagctagcctgggctacatagcacatccctttctctgaaaaaaaaaaaaaaaagcaaaacaaaacaaaaaaaaaaccattgtgttaaaaccacaattacaactagctgggctgtcacgaagccatcaccaggcagcacacaagaagtggattacctcatctgtgtcccatttaggccatattttccttaaagacatccaaatgtgaaaaaataacttggaacctgctgtacattccaggacaatctggaaaccctgaagcagtccagactcacctggcactcttcctcttctaaatttgcctttttcccaattctttttgactctgaagaaaaaatcctctgttcttaccagtaaaagagcctcctgttcccttttctttcctgtaagtcatggtaggcttgtatttcatacctttccagaagttggttggttgtggtctaacctcagaagcatggcttctgggaatgacattagctccacttctatgagctttagtgagacttcagaagcttgtccaaagctcacgctgtgggcgtgggacagaagatggcagctgtggtacctgctcactgctctggaagcaacttcaggtcctgagaggcagagtgccaacagctctgtccagttcataccagtggcttttaaaaaatagccccgatgccatgggggcagttagggctgggtatgtgctagaggccaagactcgaagcctgaagggcactgtaccatgctccagtgactgttttctgagaggttcctgcatccagctgccatgctcatctgcacagtgacatatgacatgaataacttcacaggggtaggcttcacttctctagtactttcaggggattcagtccatcgtgagagaagggcagctcaccacactacatccaggaaacaggaccatgtatggaccagcaagattacttagtgagtaaaagcacctgccaccaagtctgatgatctgagtggaggtaggagaatactgacccttccctcctgctatggcacgtgtgcatacatacacatgtgcacacacaaatatagattgacaatgagagacctgttctgttggtttcccctgccttttccatctgtccccccagcctatgggatagtgaatgccatattacctaattgtctaataaatgtcatcacagacacacccagagtatatttactaatctcttaaggaattttcatcccaatcaagatgaaccatcacataaacactaagtctcaaggacccagtccctatccagtgtcagacatgaccccatgtctgtttgtccttgttggaacacagtgttcctgagacagacagcaaagctgttcaccttgaggtcacaggatactggtcataaaagttggggaagaggaacggagatgagctctacccatcaaaagcacatctcacttcctccgtccccttcttacctactgtagcctagtcagttgtcagatcactaatggattaatccagtatggagtgagaaccccattgttttgtcccctatggaggcctgcctctgaccatttctgcattgcagtccaagccgtccatatacaagtctgtgggagttacttgatatccatgccttaaaatcaccacttggactccctcccctgcagtgctgaccctccctgagggtggccatgagaacacatttgcctcccaggatactgagcaatttggatgatgagcaaagagctggcagccaccccaatgtaactagcaatgggcctctgtactttgcatgtctgacaggtgatgtgccctgcacacaggcccccaggagttccagaaggagcctctgctgcttgcagaaggcaggatgtgcttctatccaaagaagtgctttggcgattatttattaattgagaaagggaagaaaaaaataatagggtttcctggaaagggataaaagttcaatatgataaactcccgaaaagcaatcaaaggccagagagggcaggaaaataaaggacagagagagttggagagatgatgaatcagagtggggcacgttagctgtcaggaaaggggctgtatttcatagccatgggggcggggcagcactgcggaactgccagtgggagactgccagggctgcagggcagggaggcagcttgccccacagaggtcaccaagccctgctgacatgaagggaacagatggaccagtcagctctttcatgtgactacaggcagcattgccttaatttttgtgctttagtgagtgaacacagaaaattacctatgaaactgcagctacaggcagctcactcccaagcacccagcactcattacaagagagttgcaaacactgcaggtcactgcctgtccctgccctctgtgtgtgtgtgtgtctgagtgtatctgtgtctctgtgtgtaggttgcccaagaggctcttaaaaatcttcaaacagtctggcacaatggcctggtgggtaaaaagcttgctgtacaaccaagaggacctgagtgcagatccccagcacctgtgtgaaaagctggcctagtttcgcacacatctttgcacataaaccttagcactggagacagcaggaggtgcgtgtgaacaagaggctcactagagttcactggccagccatctagccagtccatgactgccgggttcagtcagaaattctgtctcaaaaaattaaggcaagaaccaggcagtggtggtgcaggccttagtcccagccctcaggaggcagagcatgtggatctctgagtttaaggccagcctggtctacagaacaaattctaggacaaccagggctgcacagagaaaccccatcttaaaaagccagacaaacaaatgagaaaaacagacaaacaaaccaaataacaacaaaaaaataagacaaagaatgaaaatcaacctctgccatacatacatacatacatacatacatacaaacaacacacaaatacacatatactccattctatacacaaacactcacacatacccagattaatacattacagaataccctgcaggcttctctgactgttctcctcagttactctaccctaacacccctctttcctggtttcactgaccactttccagacccttccctatgcagctgcattgcatatgagcacccacaacccagggccataagtctttctccacagctctgaaatctaaatagctctgaaaaccaaaatatttttttctaactcatttggtggtgaaaccagccctgaactgtttctgagctgtggtagagttaatgagagttaatgcttgtttcctatggaaatgtaatgtttggtttcagctgaccaaagcccagctgtgggcaagacataatttgtgtgtgtgtgtactgcttgacttttaatacctaagaatgatgatttccagactcatctggccacagaggcgcaggataaggtgctgtgggcatctctacggtgctcctggtctgccttgtgaagttatggtgctgtgggccatatctctatggtgttcccgatctgccctgtgagtttatgcatgcacacttctgcagcactttctaagcttgcttttctcagaccctgccatgaattagaaatctgggttgttatttacatgttatttacattcctttctgtggctgcatagtatgccacagtggatacttgacccttttatccaagtgtccagtgcccctgactttcactgcccaggcggcagtgagtatcactgagcacactgctgtgtctgtgattcttaccatgtagcctggaactctctctgtagattagaccaggctagccttggactcacagaggtgtgtgtcaccacccctgcagacgcccttgctttaacgtgctgtggctctcattataaagccctcttcttcttcgcctctcacagctgcacagcctgttgtctgtgtttcctaagacatctgtaacaagatgttatgaactgggtggcttcaacaacagatgtttgttgtctcacagttctaaagccagaagcatgagattggaaggtaggtaggattggccccttatgagggtggaagagaaacgtgctccaggcttctctttggctactgaagattgctgatgtctttggtgtcatttggcatcttatgcaaaagatgacattctctctctgtctgctagtgacacagcttttcaccgctgtgacagaaggttagacagagtcacattaagaaggaaggctctgtcataactccagataggggtctcattccataggcaccttgctccattacttgcaggcctctggtaaggcaagagcatcatggcacaagggcatggcagctgcaaagcagagagagcaaggcagagaccaagaacaaagtgctgctaggccacacccacaatgacctccttccttaagctagtcttcccctgttagtttctatccaggccctgctaaagccgtccatcatgaattcatcagtggtctcatcctttgaaagatcaaagttctcacagtctagtcacttccaaagcccacatctgcacaatgttttggggactattctggctatacagttcatcggggatatttcaggttaaagccataatagtgaatatcattatccaaatctctgttttccttttcttttttttttttttttttttttttttttttttttggagggcaggtatgagagcagattgagacagggtttctctgtttagccctatctgtcctggaacttggtctgtagaccaggctggcctcgaactcggagatcctgccgcctctgcctcctgagtgctaggattaaaaacgtgaaccactactgccctgccaggtctctactttttataagacaattatcctggatccatacccatcctaatgactttatcttaaccagctccatctgcagagtgaccctgtttgcaaaccagatcccactctgaggcctcctaggcttgtctgggtcagccaaagtgcaccaagtctcctcactggtaccagtttgatttctgcttctcaacagatcacatcacaatgattcatgcttctagataccccatttgaagccattccttagggttaagtgggtgcgcctaacctgggcctcggttctcatgccagctcttcagaggtgccaccaagacaaggcccttcacaagcttgtgcacatttgccagcctgggccctggagatccttctttctgtcacatttttattttccttgtcctctctgccaagaaagagagtccacaggttaatagcaaaatagaagccatagatcagagtgtctgtgcagggcatgttctcttgaagacatagagacaaatagaaatctcagaaatacagggggcctttggacaccagacattaaatccatccatgcactctcactcccagggcagtgtgccaggaccaggagaaagcattttctggttgagttgaggctgacgaagcccgtgtcagagaaaagcagctagagatgaagcttccaaggcactttgaggcaggcagggactctccagagccctccagttctgaagggctttttagaataggagcttttaggctatattctaggagctggaattggaaaggaacctgggaagcttaatcaagggggacttcagaaatgtggccttaaagaagcctgtcagagaaccagaggcttcgtataactgaaaacaaagacccttgtggggtgcttgagtcctcagcctagaaatcagagttggcctacagacacttagcacagggaggttcacagaaccatctcttcaagtccatgaactggatatctgccttcagagttgcatgtaatgcagaattctgtgaatcaattcctaggacaggattcggggatggacaaattgagcccctaggcagggcagacaccaacctcaaatgcagcgctgcagtgatagctgggtcaaactcttgaatagataaaaagcccaagaacaaggaatactgctcactagcccaccctgccaagccaggtcccggagggccttggtcccctgcaaaggaaaggtgccccctttttctatagatagatgttaagtttctgttctcacagttgcatcttcaagaagagtggtccaaatgattcctggatgtccccgatggctggcctgggtccctgacatctgtcatctccttctcagctgtctagccaaaggcaaataactagtgtctccaagctcctttctttcaaacaaaacacttgttttcatgtgacatcctgacatggctttcacttggacagggctggtgatctatcctgtcaccataacacttctgaggccatgctggtctggtgatggcagcatcttccccatggcctccctctgccactgctccttgtggggaaggggagaatgtccagcctgtcaatatttgaaccactgatcacctgtgtttgggtactgaggttaggagacaattccaagaatctaaacctctaaaaatatgggaatgagccgggcatagtggcgcacgcctttaatcccagcactcgggaggcagaggcaggcggatttctgagttcgaggccagcctggtctacagagtgagttccaggacagccagagctacacagaaaaaccctgtctcaaaaaaagggggggggtgactggaaaggatttctagtgaaaggaatgaaagaaagaaccccaaatctccaccccctctcccagcccctgggcattggccactgcatctcccagcccctgggcattggccactgcatctcccagcccctgggcattggccactgcatctcccagcccctgggcattggccactgcatctcccagcccctgggcattggccactgcgtcttggattcttgggaagaaatgaagtcagtgcacccagctatgcagggcccggttaataatgaatgtggaggaaggagagaggatgttcaatatttaaacagtgcagagcgctagctgttttgccagttactgccctccgcctgtttcctggatggcctctgtaaaactgagtgctacccagttccactgctggcctctaccacctgcttatgtgaatagggaacagtagctctgaggcactccagccagaaagagttctgttgcttttcatgagaggaggagatgacggcatggggttgggggtctgtggtgtacagcttgtgtgtttagggttcacgtccaggctgtctgaacccctcacatcctcctctcggggctgcctatgtttcatctgtgttaggcttcagtggcctgactaatgaggaagattttacagggaaaaggtagacttgccttaagaaccatctcttcaagtccatgaactggatatctgccttcagagttgcatgtaatgcagaattctgtgaatcaattcctcttttcttcttgacacacgttatatcaaaagcaaaagcatccttctggggggaggagaaaagaaaacatttggcccgagacataataaaatcatgcttaaggatgcaacaaacttgaagtctcttagttaaaggaaatcaatacttttatgatgaaatattaatcatccttaaaaaaataagtcaaaactagagatgcacaagagccagagtgattttaatgcctcaggcattagcttggcatttgcaaggaagcacagagcacaagcccctccccagcctcatgagccacttgtggattttcgttcagagcacccgtatctctccatgacatgccaaagttacttccaagcatttccaaactgctgatttggggaaatgagaagtgaggagaagaggagcctgcagaagtgtgcacacacgcatgtgctgtgagcagggcaaggagagcctgcagagaaccagagagagctacctgtgtgcagtcctcctttgaaccaacagtaatgcccccatagcatcctcgtaggaggtactgaagcatgtgtaactgtttggaggcaggtcagactggttggattttgagttttacatgcatacagctgtcagacacacaagacagccctggtgtgctgaaagcaacggagcgggcatggacacatgaggctgagagcaagaactccattttctcactggtagctctgctgtaaatccttatgacaaactaggcatggaggaccctcctgggagcacctgggaagcagaggcaggatcactgagatcctgtcttaaaacaaatcctttagctcagacagttaaagttactttaggagaactttcagatctcactttagtgactgaagcctccagtcacatgggtgacaaaaggacggtcagtctcggtcatgtgtggtgttgcattctcaaaagacccagatcaattctcctaccacacaccccaccgccaagactgactaagttctgccttgataaggccagcttccagttcagcagtcaaaatgcaagtgcctggacatacagtctccagtacatgtgctctcagggcaagtagggcttctacatcacattacctaggagcagctcaaggcctgggaacactcctctccccctgtgtcgtttatctgagcttctgcttctccctggacttctcctttgcacatgacagatactgaccatctggctggccaagtgtcgtggggctccaggagcagaagccagcagagccctgcccactgagcagcagctgtaagcctcggaagcatgctctgggctggtggccatcttggcctttgtatgactcagcatgtcccctgatcccatctaacgcccaccgcgctgatagcatctttggttctttctgtattcatgtgtaaggcaacattgccatctgtcagtctggcctgaccccagtcagttaacacacacaggagagcttcagtggtatagctatagcaggagcaaaccaccctgctctataagcccaagtcctagcaaacaagtaaatgggaaggaaccccagcctgtggctgtctgccctgggggtatatcgtacatcttttgcagaaattaacagtgaattctctggcctctttgtattcttccaccttgtgtaatcctcggggctaggcatccacattatgagacctaccctacagtgctgccttgcttctggcctgagaggttagagcagggctgattagagtcttcagcaaaccaggtactcctggcctactccagctctggggacatccttgtcaggggccttcagctggcccacctgctctgtctctgggttgagaatctcccctcctgcctcctccacccaaccccaccccacccacatgcctacaaatccccatacagctatctaacggcctccttctccctgctctttcagccttgttcactgcctcagaacacaggcagccaagatggccgctggtggtgaactttctattgccttggctgagaggccgttgtggagctctgtgctctctcatgcatacatggtaatgccatttaaagtgggcagggactgggagaggcaaaagcccaggtatcctggggagaaagcccaagccctggtgccctatacttttaatagtctacagagcaccactgcagaaccagttcccaggtcctcatgccagccagacctccatagcaggtgctcctccaaggcaggggggagcatctacattcctgacatccacacagctcaggggtcccccagctgcaaaacggacacttggccctgaggtgtctcccatgggtggtggtccacatagccaggccctcacctgaaccaaagggctaaatcatattaaaatggcacagggaaaaagcagaatactgaaaaaaaattttctcttttctgcaggttttcacgtatagcccttaataaccaagaggatttgtccatggataaagagctataggctatcagattctgcaagttctcagatatttttgtatgttatccctttaaaaccaaccagaaataaaagcctttaagtgtttgcaggcaaagccagtcatcgagtcgcctatggcaaaagtcagaaagcagaaaatggtgactgctgtagtgttcccttcccctcgtttacatatctgctaccgccaccttccctgatacaggacagaaagtggcttttccactaatgggacactgggagaaaatcaaaaagtgatacttgagtgtgaagcccttcgggtgatcccagagttcatagatcagaaatcctgcatctttagacccactggagagagccagaaagtgagggagcaggggtgagggtctgtgtccaggatacccaacatgccaggaaaccctcaatgctgtgcccagggtatccacatgccaggagaccctcagtgctgtgcccagggtacccacatgccaggagaccctcagtgctgtgcccagggtacccacatgccaggagaccctcagtgctgtgtgtgttgctgaggttctctcactaagcacccaggtccaagtttgctccatgtttatttattattatttatgttatggaaggaggagtgtttgccacatgtgtgtgtgcccacagaagccaaaatgttagaccatctagaagtggaaatacaggtgattgtgggcctctcaacctaggtgctggcaaccagactcaggcctctggaagaacattactcacccttaactccctgagcttttgtctgtctaaccccttgttttgtttatttattttagcattttacttgtttagcagtagatgactgtctgtgtgtatgagaacacatgctcagaagccagaggagaggccattgggtgtcccactgtaccactcaccactgtatttccttgaaacaggctttctctctgaggctggagctaggctgtccccagcaagggatcctcctgtctctgacaccacagcagtaaggcacaggggcacatgcagccacatgcagcttttttatgtaggtgctggggactttaactcagatcctcatgctgtatcaataggcagcaatcatctttacaggtgagctatctccctcattcattcattcattcattcattcattcatttaatgtgttctggtgttttcctgaatgtctatgtgcatgcctggtgcctaagaaggacaaaaggtgtcaaatcctctagaacttgagttccacatatttgtgagccaccctgtgagtgctgaaaagcaaacctatgtcctctggaagagtagccagcatctcagtgtgtggtaagagcagtctttaactcttctgccatctctccaggtggcatcacctctgcctaaggtggctttcctcaccttctccctgattggctccccacatccaccctcatcttatcgaaggataagctccagagacatactgggtccgacgcatgcgtcagaaaggtccatgtcactccagaccttgtcagcagcagtacagcgctgtagccgactgaagtattaggctctgtcatatctctacccagttcacccaagggacctggcagatgcagcagaggtgaaagggcacagtcaaggcaagagccagtgagggagaagcagggctgtgcaggatggctgtcttgggtttgtgcaggaggtcacagggctgattgattttttttttttttttactgtttcccagcatctcagtgtgtggtgagaaaaatatgaacactgtctggctaggagcctgagccctggcctcggagtgaatctgccaatgaaaggcaatcttgggagcctgtggtccttagctcccattcacagtggcagccctggcagccctggagcctctccctcccaggggactctggggacctctggcccaggcagagctcttacctgtgctccaagctcacaccacccatcacaggagctgacatttcaggctcaggattgagccaatgacagcccagcacagtacaggatttatgtacagacaagaggcaagctagctttgccccacccccttaggtaggccacaccttgtttttcaaaaagagcagaaaggctggggctgctgttcagtgggatgcaccagcctggccttcacaaaaccctgccttctgtcctgcctgtaatcacctcactcaagaggtgaaggctgaaaagtcaggttcaaggtcatcctgggctacatagcaagttaaaggccaccctgggagaaatcctgttctgaaagggttggggcaattttggaaatgttatttccacattttaaaagttcaggcagtgtgtagtttacataaaagtccagatagccaccttctttggaagaattggaaatgtacacagagtggggggtcttacactgatggtctcagcccctgatatctttcaggacccagggtgttaacactgtgttttcctgatagaacagaaggctttcttagcctccaggtctctgtggggtcagggaagcctcttagttcttcccacccttcccaccctctttcactttcacagccaaacttgtactgtgtgtgatctctaccagtgggatccacagaaaaatctggaaaaaaagcagggaagccactctctggcactgcagtgcaccaaccagagcacttcctttttcactcttgtagaaatcacagtgtcactgcttagagaagtaagtttgatgaaggccaccatgtggtggcttctcggcagaataaatgagacactttctaaaggcaagcagctaagtctcctctgctgctctcggggacgtgccaggagagggtcaagggatgcagactctcagtgaccagtgggtcccaagacttccaccatgctatgctttccccctaagctggaactcctgagaggctcaagctaaatgtgctgttctgtgacagaagtcttcctactgtcactttgatttggcatgcagcccgatgtcggtctagtactagctgcttctgttatagggcttcagggcttgtttctctggtggtgggcttcagttctcagagggatacagatgtatgctgggagcagcaagccctacaagtctgtgggtaaggatagagttaatcctgaaagcagtgagcccctggtggtctgccaggtgtagccctacattacacagagtaggagctccttagaatgacacttgagttgagcaggcttctgcacttgaccttctgagaggcccctgtggaatcccctacatagactcaagccagttccataattccaaaaaggcaaatgctttttaacctggaacacttatattttagtcaaatacccagaaggcaccaccagcccctgctttcttggaagattaaaaaagcttcagcccaggccccagtgtccctgtctgcatactgtgcagtctcttaccgccctcaggttcaaggtcttagtcctcttttagaatctttgatttctggtttgaactcagaaagaaactcagtccatccactgggttctaccaaaacctccacttacatcatggaaggaagttgaattcataatcaggatcacttgcccctcccctttttcttcatcctaccatgtccagatccctgtactccaccagaactaccagccccataggctcagggcaattttctccctaccagaagaaggtcagagccagcataccaatatgaccaggggacgtagcctgtatcctgcattaacaaggcattcctcacaatatcagataagattagcttcaacaacatagaaaatgctagaagggaggtttctgttgctctccagtgacagcttcatgaatatgggtaaacaagggatccatgaggcatcagagaccctgctcctctccactcagtgttcttccttccctcataaagagttcccctcttagtccaggatgactgctggacttctgtcatccgtgttccaggaagcagaatagaggatgtacctaccctctttcctgttgaagaagcttcttggaaatcccacatgccactttgatgtctgtctcatggccacaactcagttataaggccatgcctagtggccaggttctgtaactgcaagtgaagggagaaatgaataatagaaataagctagctatctcagaaacacgtccacagggttcttgctgcttaagtagtgaaagctgttacccagaacactagtcatctttgcagttgggtttctcatacactgcctgagcaggacagacttggtggggtattggggggaaacctttgcccaagctggcagctagcactcaggcccaacaagtgccaaggactgcaggccagcctgggctgctggaaggaagcgctgaagcagaggtaaacaggaatggactcatcccacctctcaaagccagagtggacagaacttggacttgaacctgggatcctgactccatgcccagtattccctgtcactgggcttaaaaatgggaggcttcaacatccttaatcatcagggaaatacaaatcaaaacaaccctgagactccacctcacaccagtcagaatggctaagatgaaaaattcaggtgacagcagatgctggcgaggatgtggagaaagagaaacactcctccattgttggtgggattacaggcttgtacaaccactctggaaatcagtctggcggttcctcagaaaactggacatagtactaccagaggatcccacaatacctctcctgggcatatatccagaagatgttccaacaagtaagaaggacacatgctcaactatgttcatagcagccttatttataatagccagaagctggaaagaacccagatgctcctcaacagaggaatggacacagaaaatgtggtacatttacacaatggagtactactcagctattaaaaagaatgaatttttgaaattcctaggcaaatgaatggacctggagggcatcatcctgagtgaggtaacccaatcacaaaagaacttgcataatatgtactcaccgataagtggatattagcccagaaatttagaatacccaagatataagatacaatttgctaaacgcatgaaactcaagaagaacaaagaccaaagtgtggacactttgccccttcttagaattgggaacaaaacacccatggaaggagttacagagacaaagtttggagctgaaacgaaaagatggaccatctagaaactgccatatccggggatccatcccataatcagcttccaaacactgacacctttgcatacactagcaagattttgctaaaagaacccagatatggctgtctcttgtgagactatgccggggcctagcaaacacagaagtggatgctcacagtcagctattggatggatcacaggacccccaatggagaagctagagaaagtacccaaggagctaaagggatctgcaaccctataggtggaacaacaatatgaactacccagtaccccccagagctcgtgtctctagctgcatatgtatcagaagatggcctagtcggccatcagtggaaagagaggcccattggtcgtgcaaactttatctgcctcagtacaggggaacgccagggccaagaagtgggagtgggtgggtaggggagtgggtgggggagcgtgtgggggacttttgggatagcattggaaatgtaattgaaataaatacccaataaaaaaaatatggaaaaaaatgggaggctgaccttttggtagtgattttgttcttgacaaatgcgatagagctatccattcattcacagttcccaaatcatagcagaatggaatagaagaagacaggaaggctccggctgcccatgcagctcagagatcctgcaaagcaaggggatgtcttgctgttggcatgggtcctactgcctagccctgctctgggaaactttgtccaggtctcaagaactcacagggagaaagcttgggagaccagagtggctcatagttggtggtggtgctgggcctgagtgtgctcagctcccagggatcctatttctcttctaccttcttctttcctggtttgaaataatgttcttagggctggagatatacagtgcttgtctaggatgttcagaaccctggatttaatctcaacaccacataaactgggtgtggtggtaccacaggcctataatccagtcctcagggaagtagaggcaggagaatcaggagttcaaggtatttccagctgtttccagtgaggtcaaggccagtctgagatacattaggacccctatgtcaaaataataatgattcatggtaaggagcttagaaaattcggacaagcctctcaaagacaataaaagcctactgtaaacctacccattcctctcaggctcagccctgcagctggtcgctctgctctggacaggggtgagggaaagcctgcagtcttctcagtggagtatgcggacatacttttgctaatgtttcctcacttgccacatcttgagcacttcctaagcacttaatcttcccttccgctggcatgtttgtcaactggaggctttcatcaatggcctgtcagaatccactggctttcctccagttctggagatatccacatcttacatccctcattctacaccctttcaccagcattcacaccccacccccatgcccaccccccgtgactctagttcctacacacagactgggcccaaaggcttgcaaatccccacagcctttggtacacatctaagagctattcttgagacagacgtgggagggggatcttgtcatcagcagagaagaccctggggagcctgtgtgcctgttacccatcccataatctctaggttgtctgtgtgtgtttgcaaggacttggcagtccttgtgggttgacatagacccagaaggcctctggcatccctgctgtagttagctcatctagaactgccttgctgggatgaaacaagaattctgaggaccagggctcagccatgccattcacctgcatttctctctagtacccacctaatcccccagtttggcaagttagtgtggaagagagccccttgaaattgcaacatacagagaggatgaagaaggagggaggttcatgggggggatgcattctcagtgcctctactcagtttatgctgcaaaataggacagggttggaaccaacaagccaatgacatttcagtgcccaggtcctacacaatagaaggaaagagccacctcctgcaagttgttatctgacctttgtaggcatgctctaattacatgtaaattttattactagtctattgatgctgacccccaaattaaagaacttccttttgtcttcttttcaaaagagcatcctgggtacagaacccagggcaacctaatatgctaggcaagggctgtgccactaagctccacccacccagcaaagaacgttagtattcttgctcatccctcatgaatcgcactctaaatatgtgacagtgtctttagagacagacccccctcagggtcccagcttttcactcaccatgttcattcaggagcacacgaagtccagtcgcaacactgctccaacactcagcttgtttgtatgtgtgataaattggcggcttgggaaaagccacctgacattttgatttgttacagggtaattcatttttgaggcaagtaaacagcttgtaaactcaggggtttaccactgtacgtgattaagaagtaagcagcaataaagttcactgcaaagctgtggctgattgtccctgtggaattctcctgagcagtgttgggaatctgtcagacattctctatgtttcctctgccggcttttcctgccagtcagtcaatctctcagtgtagcctcatggggtctggagcctggtggtactgccaatccctctgtaacagccatctgaggtacacagtaggtgaggacagcaagcactgaccaccagaccccagccacctgctgttgccatgacacatgtcacctggcccagggtatcagtgagcttggtcagttggtaacagtggttcttcatgaacattagtatataaatcgctcctccttggtcaggtgtactactgagtctacagagaaggagtgtatagagcaagaggtcctgactatagtgaagagaaggaagtgaggaggtataggactctgcctggaccctccactgaccagtaagcttcccaggggcaagaaccttctctaccctttgtactgcatggagccaaacacactgcccccatagaaaaccagaacacaacattttatgcttttcagacaacatggtctccatggcagcgactctactctgtgtaagccagttgcattcagaacaagttccaaactttgtccatctaaaacattactgtttgtttgtttgttttttacaagatttatttattgttatatgtaagtacattgtagttgtcttcagacataccagaagaaggcattagatctcattacggatggttgtgagccatcatgtggttgctgggatttgaactcaggaccttcagaagagcagtcggtgctcttaactactgagccatctctccagcccctaaaaccttacttgatgagttagttactccttgtgctgccgtggcaagcagcttaaaggaagatagatttagaccatcatagtagagaaggcccgatgaccagaggcaggaagctgagaggaatgctggggttcctcttgacttctcctcttcattcagtcttggacccctccccatggaatggtgcacccatgttcagggtgggtcttccctctctgagagcgccctcacagacggaagcagagctgttgccatggtgattccaaatctagtcagatctgccatcacacttacctaacaggcagtggccagcatcttccacctttctatgttctgtggaagaaaggctagtcctggagagccttctagaggaagtgttagcaggagctagaccaggaggttccagcagtgcaggagaggcagagtgaggctggctgtgctcactgagagtaaccatgaatgtcagggtaccccttctgctaaaggatttgttcctgaccccatctcacctcagaacagcttctggattaaggggcagaggcaatgtggtctgcagagcaccagttcctggggctgaagcagagcccatatgtctgcatgggctgttaggattattgaagtatgtattccttgggaattttcatgtttgtagaggataaaatcagatgcatccgccctttggggggtgcagaagccccactgtggagagcatgaggcagggggcagctcctgggccatcagcaagactgggctttgtcataaagagattggggtttggttatttgtttttgttgtttgtttcttttttaagacaaaaatctctatatatagatcgaaccagcctcaaattcagagatgtgcctaactctgcctcgtgaatgttgagtgcagggataaagctgtgtcccagctcacctggtataaagaacccttttaaagttaagatttgttttcactgtgtgactgtgtaccatgtgtgtgcctggtacctgcaaaggccagagaggacctgagatcttctagaactggaagctcaggtgagcctctgagctgccatgtgttcccaactgctcagtcatctccagtcagcagagagcacttttaagagacattgctatgtcccctgcctgtgctgggcctgctgggaagcgtctccccatcttcctcatggttgaggccatgagagtgaacaaccagaaacagactgaggggccacttacctgctgttgagaagtgggtttcaccatgcagagctaagtatctctaagcctgggagctaggcccttcccgtgttgtgtggccacaaaccacagagcctccacatctgtgagtgactctgaggtgggctgttggtgactgtcgctgagctcttctgcagagccctcattactcctaaacctgccctgccaggactgccaaggcagaacgggttctgggaggggagacaccaggctctcagttgctggtctctgtaatacctttgcctcaaagcatatccagccactgtgatgacccaacaggcaccacagccttgccttggcctggtcaatggcagctgtttctgaaaacagtttcacacatgcccagattagcccctgaccaaagaaatcagctcgttctggcaaacatgccaaggctcacacagagaaaagtccagtcgagttgtcttgacattaaagcccccatgctgcctctaagacaaaaactggcctcccagtgtctccaactcagtatgggaggtggccctccttctccaaagcctcccattactcttctaattaatgatgttgctctgttgtcttgcaggctttgctgtggcccagtgcataaaccagcatagctctccatccctgtcatcaccgtcgccaccatttgccagtgggagccctggtggcagtggaagcaccagccactgtgactcaggaggctcttcctctgcaccctcagcaacccagagcccggcaggtattggccatgagacgtggggggactttgggaggcccttgggaccctgtgaccccttgtttcgactatgacctctgacccacagctcctcctcatggtgtcgggaagatgttgccactcagtggtgctctctatggttgagcaagatggcattatctaccagctgcattcacttatcttggatgctctgctctgctctgctgtgaccacagagctatagggaatggcaccagctaggcccagcctaagtggcatcacttctgtgagtgtcacctggaggggtctctcacagaggattgtgtgaagcctgggagaaggaaaaggcatcccttctaattgggctccagcatcaggtttcctctctctaagggagttcattaggatagagcaaggtcaactcttgctggcctttaacgtacaccagttcgaaggccataaaaagagtccattaagaggagttagactgtaatgcctcagcccacctccacctgccttgtcatgggctcttgtgagcagcttgcacacaggtttctgtctgttctgcatcaagtcccaaggaacagacatcaggtttgtttcctgattagcatggccctaaatgcagctaaagtggggataagcccagtgtcccaggcagtacagggcttcacacacccagcagcactcagcagcactgccccacgatccacagggtactcatgtctctagcctgcaccctctctgtgcccttatctgtgcctccaaggtctgattagagccccgcccagcttaactcccagggcacctatccgtgaagaaccatgaggagaggccacacctgccaaaggccgtggtactgtacccaccacaggtcccagtgtcttcctgcatattatacttccctcgctgacactttcagtttcattttcctggtagttgattaagtcacccttgtacccatgcctatgacttaggggatcctagcccacttgtgctaccctaccccaacaaggtacttgttcccatcccctgttgatgtcacaaggcccaggcaagaaggtcacccttaggcccacctcactggaacctcttccaatgtgctgtcagatcctctccttgcccccaggctagtggggagtaacatctggactcaggtgttagctaccgattgaagcagttgctgagctacccccagaagcacatccaggaaatgcagagggggcatgcttcaaggctaaggccacctctggaatcctatttttggtttcaccttgctctgggacaggagtgcagggttgtatatccatgtgctgtgttcatgcacttgctgacatgcacatttctggatctgcatttgagcccactcctgtttgccagcactcctaggacagaagatcttttctacatagtatagacacctttcttccatttttgaggaggtagaaccaacatctaagtgagcaggtagccacacacttctctgcctaaaactaaaaccaagagaagccttacactgtccaaatcaaccctatgacatgtgctcattatttctaccttggcctccctcagcccccatccctactattccctgcccagtgccaacaacatgtctttgaatctcacaaatccaggggccattagcctggctgtcacatggccaggcagttctagtgaataagtgatagtcaggatctctaaggtgtctgctccctctttgcatcccggcaggcacaccagccccattttttatgtgacatgacagtaaaagcctgagcctggctacccatccacctctgtccactccacaatagctcacctcttttagagaggctgacctggccaagagctcggcttcattcttggggagggaatcagatgttctgagacacagctgttggtcctgagaagagactcctagagcccacaagcatctccacctcagtgttccagtgtaggttacgccttcgatccagaaccaagtgcatgctttgttcctgaaggtccagcctagccagactgtacctcccacacctattccctatcaggctgtgctaaaggactgccagaaaccacgtgtcagagtttgacactagctctaagtggtattgcagtatttaggaagcagagaatagcctactggccagtttttgtacctgacagggctgccaccatcaactagaggtgctgtcctcagctagccagctggtagttagatgaacctgaggagccagtccccgcatcatccgtatctgcctgctgcccagcctaaacagcatggctttgccaagagtccatttgtcctcagagtagttttgagggcatggtactaactcagagcactgctgacattttatttactaaacctcccagaggccagggagctgcttaggttagagagcaatggccaggctcctagaaacaaggaaaacaaactccagagactcagagacaccagtgtccactgcaaggccaagtgtctgttcaggaaagtattgattgatgccagcaaaaggccagtttcccacggctgctccaagtcatactcaaatttatacaaggggcacatcacaaaaatacagctggtgtaagggttagggatgggtagtgtgatagggcatctctaggtcccaatacctttccgttgatttcaagacagccagaagaacagattggaatgttcttgaaaacaaagaaactctgtgtgtctgaagtgaagaccatacaaatagcttcccaaaccccacaggtgacagacctgccttacaccagttaaagagccagtgaagactcatgcttttctagcgtttcacatggcctggacactcatggtcagtgtgggttcctccccagcccatacatggtcaccccgtgtgtggtgtgtgtgtgtgtgtgtgtgtgtgtgtgtgtgtgtgtgtgtgtataccctgcatggtgtcctagggctgggcgccttacctgggtgcattacatccacacctccctgaggccttccctactctcctccattggaaagtgtaatggttctgacagatcatgtgacttatctgccatgctgccattagcaggtaggagaatccaaatgtgaaccgtatccttggtgacggcatagccatgttctgccttctaaaataacccagcagagtacgggacatgcccctgagtcttcctgggtatcccagggtgataccatgagcccaggtcatagtttgagtcctgactataacaactgtcttacagccgtccttcatcatacacagttgcctgtgggcccagcttcaaagccatggtcccactcaccgagcctgggactcacttagtccaggtagcagatgttgggccttatgggtcccagtgtgaggaaagcacagtagagcccagaaagccacattctcttctgattcagggttatccccaaactgagcatgagaccggctgaggctgggaggattacgtgtgcatctgctttgtcccgctaactgacccatacttcctgtctgggtctgaaagagacccacatgtaccccaggatgggcattctccgtttctcgtggggagcttcagcctgtgctcccaggcaccagtggtgcaggttgcccatcttggttagggagcctcgagacctgacccaagacattcctctgctagacgggcctttcacttgcaggcttctccctggcttcctcactgtgctgtctctctaggtagatgggttcgtgctgagttcctactgtgcacatacattagggacaccaagtgaccaagtatgttctcacagatgaacagaggcaggccaggaccatcagatcaccacagaggcatgtgtgcagttgaaacccacaatgagggaccaagcaggggctccaccagctggcacagaccagctagagaaagttcttgtattcctagagacaagacccagggagtaaatgctgcaatccaggggcccctaaggaacgggcgtctgaggctcatacaggtcggcctgtgtccatacctttatcttgttggaagcaagtagattccttttccccatctcccaaaagctttcctgcaaaccctgcccttctgagtatagaagggaggcagtctgtctttgagaaacagctcctgtgccttatggccaagacctctggccagaagtggttttagagcctgtaggcccggctcagattgggaccacagccaagaggaagggtgcccttagcagtcaactagtgtgctattaccagcagtgcctgctgtatcccctttctgccatataaaactaggcatattccaagtggctttttaacaagggctcaaattgggaacccacagacaccccaaactaagagagaacccatacagaattccagactgcctcaggaaccagtcagacagtgagtgagttttgtgttcctggtcagcctttgcctatcacagctacactaaagggtcttgcagggacttgagtggtctgctccagcacccagtcacactcagtctgtttgcccattgctccttcttgtgtcttagttcttactttttgcaattagtcttgctgtgttgctcagactggcccaagtgatcctcttgcctccgcctctgagttctgagactgtggcctctgccatgacacccggctccactgcacttcaacaaaagtgcttttgggtggccagcccctcaacggagagcttaacaccacgtgtttctttatctgtcccaggaaccgagtgactcacgtgtctagctcaactagatggcaagcctcagcttgacccctggtgagaaaaggcatcaggctaggtcaacactttctctgtgaaatcaaacgcagtagcatggaaggagtcagtgggctccttatcagaacagtgtgggcccagtgccctgtgcaccctcatggtgccgcgtgcacacatatgagcatgtgtgctcagtgtcagacccggttgtatacactcacattctgtggagttgtttctgagacaacaatgaaagtcagactagcctgggactgatgctcctgcctcagccgtcagagtgctgagatgacactggccaggatgcctgtctttatggagtcctgatgaggaattgtccctcagatactggtcccacgatgtacctttagttccttgcatttctggcatccatgtgtgccagagttttagagtttctttgtgagcctctttgaggcagaaaacagggagtgtttattggaaatgatgctggggagaaggtcaggctgcccttgcaagtgtaaatgtcactctgtgcacttacagccactatcccaagggctgacaggaaaaagaaagggacggctcttggggcccaggcttgagagcctccctgatctccctccgcaggctccctcttcccctcagcctctctaagcatcctgcctaggtttttacactaaggttctgatcacccagtccatagacctgtgtgtgtgtgtgtgtctgtgtgtgtgtgtgtgtgtgtgtcgcgcacgtgtgtctgtgcacattttgaggtggtaaaatacagccaacataagatggaccagtgtaccatcctcagcatggtgtttgcgcatgctcccgctgggcttgctctgtgactttattcttagctctcctcttagagtttgtctctgagaccaccaccctaagaacactgtgagtcctccctcttgttcctggtccagcttgtgcattcccacttagctaccaactgcctggtctccccatttcctgctctgtgccctggtcctggttccccaagtcatggttccaaagtcctggaactttcccaagtcatccctctccccaaaacaccactgaggctaaggcaggagtcaggtccagcatccaggattgacttcaaacttgaagcagctccctccatgtcaccctcccctgcgtcagaaatgcttagttcactctggcctggctctgaccctctgaccacacccctccttcctgcaggcatttcctctgagtttcccatcttcctgcaggtcccagataaaactgagaagcagttttatccttttgtcccctggtttttctgacaagaccagaagttatcagtgacccaaatctttgcacaggattgagccttctccgtctctaaccatattaagttacaagagtgagggattgaagccctgtgcttgcctggcatgcacaaggtctgagcccaggcccacataaagcgagcctcgaggtactgcttgtactcccaacactcaggagctagagggagaaggagcagaagtccaagctgtcctcggctacagcagagtttgaggccagccctgactgagaccctgtctaaagaagaaaagaaagaaaagttgcgtaaatgaacaattattttccttagctctcctgaccttggctcgtcttggggacagcatggacatgtcctgtctacatggtgggctggcagtctgggttccagctgaactgtagcccactgcagccacagcccttcttcctttgtccttgctaatgctgtgtcggtcgctgctgtgtccttttcttttccacctcaccttcgccgttccattgttacaggctttctatgacctgtcgctgtgttttccctctagtcaggagtggcaggaaaggacgccggcgtgtgttcagcctgtcggaggccgacagtcacggcggccactgggtttagtgcttcgaccaacagctgccacggcaactcacgcacagtcaaatcaggcaggtctcctacaggagcccccatgggcccacgctattcctgccacatgtaacagggtcagcatgagcagggcgggcaagctgggcttagagaacacgccatcagatctcagcttcctctccctttctgtcctcagccccagccagtccttcctgccttatatgagagtattgcccttgtacagcaatcaggctccaggcagcctctccagagtcagccctgagctggaggccatgtcctgtatgtccacacaaatccctgcagtcccactcactattgactagggaattgaaagcctgcaaaaggcagcctaggatgttctttcccagaccttggcccaagctaagcagcaaatgcagctactagcatccaggcccagtgtttcctccttggtagactccatctttccagtgctcccatcactgtaagcgtcaccagaagaggtgagccggctctccttgtcagggccactactgctgccatcctgggacattctcctgcttgctgacatgtccatgtgctgacagtgtgtgttggcatcagcccttcacttggctttctgttcgacagctgtttggagatttgcatcagcttgctacatggagcccttccttccttcccacagcacttgcctgccagtccagcctgtatacaaccagtccacatcatttctggaagccatcacttactttacaaaggcctttgagagcccaccctaaagcagcagatcccatctgaggggctcagcttcctagtactctcacaggcagaggctggaggctccgcaaccctcctgggaacacaagcttgctgtggctaccactcttgctgtggctctctctgcctccccagctcatgcccaaacccctcttctccagtcccaagtatgtagcctttaggtctggaagcctcagcaaagcagaggtgccaaaggtccaccaagtcacctttgctgctcaagctttgagcagagcatggcctctctgtgccttccttgggaaacctgccctgcttctctttctttgcccccttggttagataaatttgctgcccattttcaggaaataatttccagtatagacagcagtagaaggtgggagcaaaaggacattccttttttttttttttctattaaaataactaggggtattttttaaagtggaaaaaacagcccttttaacaaaaagttgctacttttctaaagcagccatttgtgtggcattgttggttattttgcttttttgatggatttgaaggtgtgtttgaccatggtctccctgccttcatgattattctcatccgcaaaagccccactagagaaccaggaaagaggtaagaacccaggaaggcagcgtttctgtccccatcaccaatagcaggacaattccatttgcagcgggggtcatttccaagctgcctagtcacagcctctcgtggaggccttcccaggcaggctcagacctgtcccaaaactttgaaaaaggtcactgagcagctgagtgccacttagacatggagggttcacacagggtcacaacaggaacctgaactaaagccagcccagctcccaagcatggctcgtacagtgagacaagtcagtagttagcggagactgtgagcagcgagggacggcggtgtgagcacagcagtctgcacaacagacacctctgtctctttttgcaccagttctcactgacacccacagcccccaagcaagggcgggcccaaagccatgggaagtggctctctctagactcctgctctctccttcctgtgttaagaaaggacactgggtaaaggagctcctgggcaaacatttggctagcattgtgcctgaggccctgggttccatccccagcagtccaaaaaccaaagtacagctcttagaaggaacggaactgactgacccttccatcttcccagagtccagaaggaaggcacacggcagcatgtgctggcgtgctggctgagcaagcgagcgagcgagcaagcggcatgcgctttcctcccctttggctcccctgcttgccaccattcctcatgttgcctgcttttattctgttcttcgttcttccatcctttggctctgtgtttggtttgcttttctgttttattttggctttagaaaacaaaatgaagtcaccagaataacattgaactaaaactacatcccatctgccccaaatcccctcatgaagctctaggactgaacagttgccatcttcttcggaggcctgttaaccctagaatccatacagatatgaacgtgtagccaagccacatccctagcacctcctctcggggtcttaaagtccccaggctgaagtgctgaatggctcttcccttgaatgccacacattcctggctggcatcattgaaaagcaagtggcctgcatctatccagtctccaagggtttaataaagaaccaaacaaacaacaacaacaacaattctacactgggtgctcgttttggcagcacatatactaaaaattccacattgggtggaggctagctcagtagtggccctgggcaagcccatctgcttggtgggtgcaagcttagtgcctgcagaaggcggaagctcacaacagtacaagattttagaaactagaacattctaccttttaaaaaaaaaaaaaaaaaaaaaaaaaaaaaaaaaaaaaggctgttacactggattccttggcaaatatctccaaatgtaggctctggaaatagcctgggattgtagagacgccccaacctgtttgctttcagtttctgtatttaccattaggcaatgctccaaactctctgcctgcacacagagcctgcccagaccaggtttcactttcagtattcaggtgttgatttcagacaaggcctgagttttcacaagtcaggtacccaagatcctaacacactatccctaggcctaagttagatgaagctaggagcttctgggtcccatcaaggagttggtggaacaggcatgcccctaatattagcagtctccccacagagttttccaccctggtgcagtgcaggagtggcaggtgccagctgagtacagtgtcactggagctgagagtatctctgttttccttcccacctagatgcccccacgactccagaacagcctcagcctcacctagaccagtcagtgattgggaatgaaatggatgtcaactccaagcccagcaagaactcatcggccaggagctctgagggggagacaatgcacctgtcccctagcctccttcccgcccagcagcccaccatctccttgctctacgaggacactgctgacacactgagtgtcgagtcactgaccattgtccccccggtcgatccccacagcctccgagccctctctggcatctcccagctccccacactgcctgcagcagatacggagaccccagctgagggtgctgtaaacccagagcctgcggaacccacagagcactgagtgcgccagagctctccctttgtgtgtgcggcccgctggtagggaccccccatgcattttgtgacagcaagacacactgggagcacccacaattctccgtggccctgaaaactgcccctcatacctctccctacaagacaaccaccaagcactcatttgctctgacctctcgctgagcaggctgggatcctagaaacggcctcctgtgtagagacgatggcattggccacctcagaggggtctggggccctgcccctgatcctgacagccgcagggggcaggacccactggcaccgtcctttgggcagctcctttgtcttccctcccagtgtgcacagaagtggacaaggttactctgggtagaaacctgtggagaagcaaacctagataagcatctcctcgagctagttatttctggttttggcaacaaatgaagagatttattttaaaagaatctattttggaggaggggcaaaaagaaaaagccctcaaccataaggctcggagtctcattagaagtgtcagctgttaaggttctctgtccttagaacttttccatgtttttattctgaagttgtggctgtcacttcctctgttttcctgagtgattcttctttctctgtccccaactctacaagcctgtggggtgatgatgtctctccctgaaacactgaggtacttctgaacaagatgagagagacctgagtccgctcaggtcacatgggtgagaaggccaagcctctgctctcgcgtgacctggatgacgtctgttccctgctcaggacaccacacagacgctgctccgagcaggcacgctcccttctctcttcatccaagaaagacccattagccagtgtccgtgacagaaatcaaaggatttaaggcacagaaagtcatcctcagatataatctgcttcccaagatgcaagtggatgcccaactggggcccagctgcaaaacaggtgaccaaaagcagaatcccaccctccccctccctnnnnnnnnnnnnnnnnnnnnnnnnnnnnnnnnnnnnnnnnnnnnnnnnnnnnnnnnnnnncaccctttgctgcttccacgcagtatgaaaaccccatagttgtaggcatgtgccagcaaggaacagatctgtgccatcagcccctccctcctctgaactggccagccaggtcactactccaggctccgtggcgaggccctctatggcttcctacagatctggcctcacccagtttcagtacccaccaaaggcgagccacaagggtaccccatacattaccatctgctcatcattagaccctgacactctgctaagctaacttccctgcaggccccaatgctcagttttccaagagaaagcagtgctccctaggaaggtagtggaacccatgtggactggcttctctggtctttaaaagtgctccagtgggcatgctgtcaaagacaagatgttttctaaaacagaaggctgggtcaggaagtcaaccaatcttccttagaggcagccactccaaaggccctggcaaagtaggatgttctaggatgcttagcccctgggaagagaggaaagtgatggccactgggaacaagagctctgtggaccccacagccaaccttgggtgttttttgctcatttgcagggaggggtagacaaagaagcaggctagccctgtcttcagcacaactgtacactttgggttttgaaatgacaattgctagggtcagcataaatgttacacaattcaagtgactctctaccatgcagtgtggtctccagagaaaagcctacagccaccctaacccacataaacaggtcagccctatccttctgtgactagcctcctctttgcaatccggaaattttaaggaagggaaaagattgtgcccatggtgttcagcaaaccctgaaagggcaactgctgtgtaaaattcaccaacaataagcctgttcccacagctggctttaaggttgctcccagagggttcctgcaaccaggagcctagggcatacctccaagtgagcaaatgtggacttcctgtgagcagaactgtggcccattgctgatggagggatggggtcctggaggaagcaacaggacctcaggactctgaagaaggacactgtctcacctaggtgttggtggcattgggtacaacccagtcttcaggagtactctgctaacttggcaactgtgctctccagacagacctaaccagcaagaacctactgggtctctgtagaactgagggatctaaggtccagtaggtcccacagctcctgacctggaggtcccagagtcagcctccaaaatcattgctcccatctcccaggccatgcatgccacgtctgccctggtctccctcccttcttcaactgccccagggcagactagcagagctggcctctaacccatcacctcagctttgaccgtcaccatggcaacatgcagtgctgcctcctccctgttgaagtcttaggcaggtgggacacttcccacaggtcagactcagtgtggtggtgagcgccctctatggtggaagtggtgaagaggcttcacctgctactctacccaccaaacacttgcattggcaggagtaggctggctgcatcctaaggatggcattggctttctctgtggcctctgacgtgcagttgtaaataaggcatgggtaaaccaagtctgatcttttgtagatgcaataaatatatttcacacagtcacaatgggcagaaggttaaatgctccttccctccctcagagctgaagctgtgaggaaaaaagagggggagggggcagaactgggaaggtctggccagggaagtgcctgcttctgccagcaggactcatgctttgtggggactgaacctgaggggaggaatggaagctagaactttcttgtaatttgaaacttggcaataaaaagcaaaaccaatggcccaggagtgtggcctgctgttcctcggcaccatggtggaggctatgctacagggagggtggtcaccaaatgccttgacctgtcaacagtgcccaggtgggacataaggactagagaccccactgacatcctcagctctgtcctagctgggaaggacctactcatgaagggggacagaaccttgagttgctctgcctcggctccttcaaacctagtgctcattctatatatatatgatatgggctgctgtggccctgcctgtccagatggggcaggaaagacctggggaccaggaagggctccccacctgggacagtcaggtgacactggtgatcacagttcctgcatacaccaacgtggaaatccctgggttcttctcagcttctggtccagcttgagtctatcccagaaatgcctggggcctttaagagtcttgagagcaaacctagaagaagaagctggactctctcaacctcgatccaagtctttgcaggagaaatgaagcccagccctgaactggcagccagcagaggctacttccccttctggactgtggttgtcttaattccttggaagtccagccatgatgtctgcgcctgggaaggctctgaagttctttgattggggtggaaatctgctcaccactggacatcagccaaggcccacctgcatcctcttttaccccacagcagccctgcttggttctgtgggcattcacatgtttcagtagcctcagtgacctcaggatggacagaggccaggaataatagttttcagggggctccctgtctatcctggatctccaagtcaagaactaggccctcaggggtgtagagacccaggtgagggtgggcaagcccatacctcatgccgtcccttattacagctaaggaaagagggggatctgaaatctgtatggcagagatgcaggtccccgggctgggatagtcatgtatccacttcacagactttggatacatgttagaatcatctggaactgaagcccggaactagaagcacacaccctggtcatcagtatgcagaacccacactgagcccttcgcactgtctgggcccagaggtggcctacaacccatcttacatgggggtgtgactggctctggctgtttgcggctaccagcacccaccctcacagcctccctcaggcccgcagcagccctgctttgggcatgtgtgcacttgcatgcttagtagcttcagtctagtgaggagggaatttactgtaagtaaactcagggaggtagcttcaaagttggggaagttaggtgactcctagtcagtcacagctctgtgtgtgtgtgtgtgtgtgtgtgtgtgtgtgtgtgtgtgtgagagagagagagagagagagtgagagagagagagagtgagtgtgtgtgtgtgtgtgagagagagagagagagagagagtgagtgtgtgtgtgtgtgagagagagtgtgtgtgtgtgtgtgagagagtgagtgtgtgtgtgtgagagagagagagagtgtgtgtgtgtgagagagtgtgtgtgtgtgagagagagagtgtgtgtgtgtgtgagagtgtgtgtgagagagagagagtgtgtgtgtgtgtgtgtgtgagagtgtgtgtgtgagagtgtgtgagagagtgagtgtgtaagtgannnnnnnnnnnnnnnnnnnnnnnnnnnnnnnnnnnnnnnnnnnnnnnnnnnnnnnnnnnnnnnnnnnnnnnnnnnnnnnnnnnnnnnnnnnnnnnnnnnnnnnnnnnnnnnnnnnnnnnnnnnnnnnngttgttggttggcattcctcaggttatactttttgagacagaaacttttcctctttgcctagagctcacttgtttggctagattgagtgactagcagcaaacccaggaatcctctctccatcgttccagtgtcacttcaccctaattacttttttttttaaatataaaaatgtgggttctaggcattgaacccaggtcctcatgtttgcaaaccaagcacttattccctgaccctttatgaattgattctctctggaatctgttaccatagaaaattgactaatctcaagcaacaccactctgtggctggtgtagtggctgggggccaggcactttccattctcctgttgtatccccacagtgtgacagatctgcccactgcaggtaggaggggcaggtggcagcattctgcctgcccaaaatctgaatccttctctggagggcaagacctggtcccaagcaactagataaggaaagccccttctacttccaagacactaggaaaaagccttctgggcctaatgtgctgctttttttttttttttttttttttttttgagacagggtttctctatagccctggctgtcctggaactcattttgtagaccaggctggcctcgaactcagaaatccacctgcctctgcctcccgagtgctgggattaaaggcgtgggccaccacgcctggctctaatgtgcttttctccagaggaaggtgggtctggcatcatttgacttcttgattcagttccattcagcaagcactagacagagccacctgggtgccagccttgactgagttccagggactcagatatgactcagatgaagcttctgctatcacagatctactcacagacaggtagacagacagaccactgctgtcaacctgtaccacctgtaggacagggcaccatgaggaccttctcaaccgcccacatccttatctagaagtgggtccagtgagagtaggctggcccccttacattctgggtccctttacaacacatgacatatttacactgagagtccagtctgtgacttgagttcctatgctggctgggcctggctgagcagaagaaatagagaggcacacacctgtccccaggggttccatgagcacagggttcactcaagggttctaaattaaactgcatggttaaattcagatggtaagtaggtttgagacctttgagaggcaccaaggtggcccaaggtcacatgggaagacagctctcagttgataaaggagttcaggacgaattcaggaagtaacatcacgggtatggtgggccacatccacagccaggttccaggaaactgtccctgtgtcccacatccagcagtggtcatctcctttgggcatattcaactttcccctttgactctctcattcccaccagccacttaaagatcttgccaattggaaaagtctggggaagtccagatttctgtgatctaccatgatgagctgtacagccctggatggcacctggccaatctccctccagacttttctttgtgaattttgacaactgaagtataatggatgtctgcttatgccctgcttggacacagagccagccacctgggctcagctcagctctattattcctggaggccccctttctaaagaacccggcaagttctaagataatgacatgtcccttaggtgagctgctgcctgagactgggtgtaaatgtggcttttgctacttcatcctaactcagcctgaacctttctgatactgtgacaaaagcctgaagcagacagcttatgaagcaaaaaggtttattatggctggggtctttgaaattccagcccagaaggtggtgggccctatctcctttataactgtgcagcagatggttgcaaagcagagctgccagtgtcacagctggaaaatgaaagaaaaaagaccaagagtcacacagtcccctcacacacactcccatgatggaagatcccacactgcagagccctgcacttgcaataacagtctttagtccaggtcctcacatgttctacagcatgttccattgcatcacattgtgccgcaactgaagagctccagggactctcaaggcccaaagtataagagctagcctcaactatgtctccatctgctattctatgtacaatagaagctgactgtggaattcttaaaccccattcataaggttatagctacaaatgagcagatcgccttccaaaacatcaagtgatcacctcgtcacagcttcctggcccaagtgctctgtgtgtgtctgtgtgtgtacaagtgtctatacatgtgtctgcaggtacaattatgtatatttatgtgtgtacataggtgtgaagggaagagaggccagctgtagctgccattcctcagtcactatcatttgttgagataaggaacttatcttgccggcctgggactcaagtaagctaggctgtcaggtcacaaggtccagggtcctcctgttgccactttccatccctgggattacacgtgtataccaccgtgcgtgcctggtgttttcagctcaggttctggcatagagctcgggccctcgtgcttgtgaggtaagcacttgtgcagctgagaatcttcccagacataagatactgttcaagccctccagtgctcagcccaaccccctcctctgtgaagcagagcctcaacacctctctaccctccgtggcccctagccaccccagctgcaggtctgagacagagagagctcaccacccccagccctgctttctggtctccaccagacaaatgtatctccattagataccgggaggctgcctcagcaacataggttggtgccagattctgttttgttttgagacagggtctcactatgtagcccttgcaggccgggaaatcactatgtagaccaggctgacctctaagtcatagcccatcagcctctgctgcctgggagccaagatcaaaggcatgtgccatcactctcagcttttgctacttcatcctaacgcagcctgaacctttccgatactgtgacaaaagcctgaagcagtacactcctctatacaggagaggagcaactaaggccccgaccagagggtgacttaacccagatcacacagttcctgagaagtgcaaatgattcctgctaaccagtgtttccttcatgccgaagccttcccatcattgctccgttggcagtgggcccagctcagccacctgcactccctagtaccacatgtgagtgagtctgcgtgtgaggctaccccgggctcctgccccagagcctgtcctctcagagtgagagcaggacagtggaagaggggggaggggagctcatggagcctggaggctacacccagccaacagtcccaacactccggcagcaccacccaccacaccatagatagccagcagcttcctgggaactgcgtatagtctgggcagcaccttatctctccttgaagctgcttacctagcacacctgatctttcctcagtcaacccgcagccacacgcctgcagagccactgcagtggtgccttggccttagtgacatttgtcaccaagagcaggtgactacatgctgaccctcttcctgaggggcagaggaaaggcctggcctctctgcatccgctttgcaccaggttctatgtgagaagccaggaagactgtaaaaatgcagcaactcccagcaagccagttctgagcgccggagaaagtaaagcctaggaaggggcaagcaggccaaggagggcgggagccaaagacatccttctctaagtagccaatgcaccactgtcgtctccctcaccccatcctcttctccaatgccatcttcacctccatctttcctctggtcagctcctccactgccatcttcagcaccgctgtcagcatttctatgccacaacctcatcctcctgaatgctagcctctactgagcgctccctcggcctcagccttgtgctctttgggttgttatggtccgtctctgagtggcacacttgccctcttacccactctgtgctcacacacaggttcctgggcttgcctgaggtcttgggtctgggtctgactcccagacaaatgaggctgcacagccctaagccctgaacctcagagacatccctgtggcctggccaagttggtcccttgcactgtcaccatgggcagggtgttactgcagctgcaataacagtctttagtccaggtcctcacatgttctacagctctgaggacaggcagtctggaaggctgggcatggtgaagtgattctcagaggaaggaactgccccaagccacactccaccctcccaaagtcacctggtttcccaagaagagaaatgacagcaggaccagagataccttcagccaccagggacaagagccacaggcaccttttgtgatcacctttcatccctgctcacctgagagagaaagtgtccccagcggggtgctagacacctttaatgatagggtccaaacatccatctatctctaccctctgagtcttcctggggagcctgaagctgaaattcagactatttatttgtgggttgttgagccaaggaaactgtgtggatcattctggtctcaaactaatagcagtcttcctgcctcagcctcctgggtgctgggatgacaaagctgagtgaggtctcacactggctttctgtttagtttctgatgttttcactgagttgccaccaaacaccacaagaagggggtcccgttgcagcagggtttcaggaccttacctgcagtcagattaggcttttcaaagctttgagtttcaaaaaaactaattatgcagggcagggtggcaggtgtctgtcaggagttcccaggacaaacccaggctacatatagtgagaccctgtctcaaaaacaaatcggagcaatgcccagcagttaaagtatggaccactcttccagagaactggagtccaagttccagaccccatgtcaggcggctcacataagctccaggggatccagggtctctaaccaccgtggacatctgtactcatgtgtgcatgcccacacatatacacatgtacacagattgtaaataaaataaccattaaaaattaataagtaatagcggttaagtagtagcactcagccttactggccagcaggagcggcactgaaaagcctaagcatgtccagtcttgcctctcggcctggcatcatagtctctcagctgccagcccactcttcagctatctcagacttcctggacccttcccctggacctaagctactgataatgtgatgtacatgcctgaaacagccatgctaggaccaggcagaggtagaaaggttgaggggggcagacatgagcagaaccctcatcggctgagagccctggaatgaacggccatagggatactgcacttatatctgctctcgctctcacactgtgtcctgtagaccaggctccactgtcagacagcctcggtgtgtagaagggaatgcccagggccggagagggagagtagcctgcctaaggcccacagctgctcaggacagagtaacccctaggccccacctccctgacctcagaactcacgctctctctcccacaacctagattctaagtgccctcatctgaacttctccagctccccaaaggctcccagatggaatcatagtctcgggcagtgaccaaggggtgagttcctttactctgcctgggatatggactatgatgtgctgtgcccacttcagcaaaataatttctgtagcctgttcctagaaggaagggcaacagcgaatgctgacctcctggcac

SEQ ID NO: 262 - DNA, 2649 bp, Mus musculus
ccagagagcacttcatctaccagatatgactcctcctaggcgagtcagggagttagtactatcagaggatgggggaattccaggatatggccagagttgtcacatcaagaaatcaatgtctttgtgtcctgaccttctcggttctcccagtactgtcatcacttatgtgagattgagatggtgatcatgaagcttggcaagctctcagaggtggccgctgctgggacctcagtgcaggagcagaacaccacagacgaggagaagagcgccgccacgaactcagagaatgcacagtggagcagacccttcctggatatggtgtaccatgccctggacagccctgacgatgactatcacgccctcttcgtgctctgcctcctgtatgccatgtctcataacaaaggcatggatcctgaaaaactaaaacgaattcagctcccagtgccaagtgaagctgagaaaaccacctacaaccatctgctggccgagaggctcatcaggatcatgaacaatgctgctcagccagatggcaggatccggttggctacactggagctgagctgcctgctcctgaagcagcaagtactgaccagctctggctgtgtcatcaaggatgtgcacctggcctgtttggagggtgcaagagaagagagtgtccaccttgtacgtcatttctataagggagaagagattttcttggacatgtttgaagatgagtacaggagcatgacaataaagcccatgaatgtggagtatctcatgatggatgcttccatcctcctgcccccaacgggcactccactgactggcattgactttgtgaagcggctgccatgtggtgatgtggagaagacgaggcgggccatccgggtattcttcatgctgcgttccctgtcactgcagctgcgaggggaacctgagacccagttgccactgactcgggaggaggacctgatcaaaacagatgatgtcttggatctgaataacagtgacttgattgcatgcacagtcatcaccaaggatggtggtatggtccagcggttcctggctgtggacatttaccagatgagcctggtggagcctgacgtatccagacttggctggggagtggtcaagtttgctggccttctacaggacatgcaggtgacaggagtggaggatgacagccgtgccctgaacatcaccattcacaagcctgcctccagcccgcactctaagcccttccctatcctgcaggccaccttcgtgttctcggatcatatccgctgcattattgccaagcagcgcctggccaagggccgcatccaggccaggcgcatgaagatgcagaggatagccgcccttctggacctcccaatccagccgacaacagaagtcctgggatttggactctgctcctcctcctcctcctcccagcacctgcctttccgtttctatgagcagtgccgcagaggcagcagtgacccgacagtgcaacgctctgtgtttgcatccgtagacaaggtgccaggctttgctgtggcccagtgcataaaccagcatagctctccatccctgtcatcaccgtcgccaccatttgccagtgggagccctggtggcagtggaagcaccagccactgtgactcaggaggctcttcctctgcaccctcagcaacccagagcccggcagtcaggagtggcaggaaaggacgccggcgtgtgttcagcctgtcggaggccgacagtcacggcggccactgggtttagtgcttcgaccaacagctgccacggcaactcacgcacagtcaaatcaggcagatgcccccacgactccagaacagcctcagcctcacctagaccagtcagtgattgggaatgaaatggatgtcaactccaagcccagcaagaactcatcggccaggagctctgagggggagacaatgcacctgtcccctagcctccttcccgcccagcagcccaccatctccttgctctacgaggacactgctgacacactgagtgtcgagtcactgaccattgtccccccggtcgatccccacagcctccgagccctctctggcatctcccagctccccacactgcctgcagcagatacggagaccccagctgagggtgctgtaaacccagagcctgcggaacccacagagcactgagtgcgccagagctctccctttgtgtgtgcggcccgctggtagggaccccccatgcattttgtgacagcaagacacactgggagcacccacaattctccgtggccctgaaaactgcccctcatacctctccctacaagacaaccaccaagcactcatttgctctgacctctcgctgagcaggctgggatcctagaaacggcctcctgtgtagagacgatggcattggccacctcagaggggtctggggccctgcccctgatcctgacagccgcagggggcaggacccactggcaccgtcctttgggcagctcctttgtcttccctcccagtgtgcacagaagtggacaaggttactctgggtagaaacctgtggagaagcaaacctagataagcatctcctcgagctagttatttctggttttggcaacaaatgaagagatttattttaaaagaatctattttggaggaggggcaaaaagaaaaagccctcaaccat

SEQ ID NO: 263 - protein, 537 aa, Mus musculus
PSRFSQYCHHLCEIEMVIMKLGKLSEVAAAGTSVQEQNTTDEEKSAATNSENAQWSRPFLDMVYHALDSPDDDYHALFVLCLLYAMSHNKGMDPEKLKRIQLPVPSEAEKTTYNHLLAERLIRIMNNAAQPDGRIRLATLELSCLLLKQQVLTSSGCVIKDVHLACLEGAREESVHLVRHFYKGEEIFLDMFEDEYRSMTIKPMNVEYLMMDASILLPPTGTPLTGIDFVKRLPCGDVEKTRRAIRVFFMLRSLSLQLRGEPETQLPLTREEDLIKTDDVLDLNNSDLIACTVITKDGGMVQRFLAVDIYQMSLVEPDVSRLGWGVVKFAGLLQDMQVTGVEDDSRALNITIHKPASSPHSKPFPILQATFVFSDHIRCIIAKQRLAKGRIQARRMKMQRIAALLDLPIQPTTEVLGFGLCSSSSSSQHLPFRFYEQCRRGSSDPTVQRSVFASVDKVPGFAVAQCINQHSSPSLSSPSPPFASGSPGGSGSTSHCDSGGSSSAPSATQSPAVRSGRKGRRRVFSLSEADSHGGHWV

SEQ ID NO: 264 - DNA, 3777 bp, Mus musculus
catttcccagatttcctcgcggcggcggccgtaaagcgcggcggtcgaacggccggttccggctgaatgtcagtgcggggctttgggctggggagcaaggtgcttggcagtctctccaccgcccccgccgccgctggctgggcttgagatgtcgccgcggacaccgggccgctgggcggctcggacatgaaaccgtgaggcaggcgacagggctggtctgcggacatgtttggacgctcacggagctgggtgggcgggggccacagcaagtcctcccgcaacatccactccttggaccacctgaagtacctgtaccatgttttaacaaaaaacaccactgtcacagaacaaaatcggaacctgctcgtggagaccatccgttccatcactgagatcctgatttggggcgatcaaaatgacagctctgtgtttgacttcttcctggagaagaatatgtttgttttcttcttgaacattctgcggcagaaatcaggccgttatgtgtgtgtgcagctgctacagaccttgaacattctctttgagaacatcagccacgagacatcgctctattatttgctgtctaataactatgtaaactcgatcattgtccataaatttgacttttccgacgaggagatcatggcgtattacatatcgttcctgaaaacgctttcattaaagctcaacaaccacactgtccatttcttttacaatgagcacaccaatgactttgccctgtacacagaagccatcaagttcttcaatcatcccgaaagcatggttcgaattgccgtgagaaccatcactttgaatgtctacaaagtggataaccaggccatgctgcactacatcagagacaaaaccgctgtcccgtacttctccaatttggtctggttcattgggagccatgtgatcgaacttgacaactgtgtgcagacagatgaggagcaccggaatcgggggaaactgagtgacctggtggctgagcacttggaccacctgcactatctcaacgacatcctgatcatcaactgcgagttcctcaatgacgtactcaccgaccacctgctcaacaggcttttcctgccgctctacgtgtactccctggagaaccccgacaagggaggagaacggccaaaaatcagcctgcctgtgtccctctatcttctctcccaggtcttcctcattatacatcacgccccgctggtgaactctctggctgaagtcattctgaatggtgatctatctgagacatacacaaagcctgcacaggatgttcccagaagttctgccaagcccagcatccggtgcttcattaagcccactgagacactcgagcggtcccttgagatgaacaagcacaagggcaagaagcggatgcaaaagagacccaactacaaaaacgttggggaggaggaggacgaggagagagggtctgctgaagatgcccaggaagacgctgagaagactaaaggtacagagggtggttcaaaaagcatgaagacaagtggggagcgtgaagagattgagatggtgatcatgaagcttggcaagctctcagaggtggccgctgctgggacctcagtgcaggagcagaacaccacagacgaggagaagagcgccgccacgaactcagagaatgcacagtggagcagacccttcctggatatggtgtaccatgccctggacagccctgacgatgactatcacgccctcttcgtgctctgcctcctgtatgccatgtctcataacaaaggcatggatcctgaaaaactaaaacgaattcagctcccagtgccaagtgaagctgagaaaaccacctacaaccatctgctggccgagaggctcatcaggatcatgaacaatgctgctcagccagatggcaggatccggttggctacactggagctgagctgcctgctcctgaagcagcaagtactgaccagctctggctgtgtcatcaaggatgtgcacctggcctgtttggagataaagcccatgaatgtggagtatctcatgatggatgcttccatcctcctgcccccaacgggcactccactgactggcattgactttgtgaagcggctgccatgtggtgatgtggagaagacgaggcgggccatccgggtattcttcatgctgcgttccctgtcactgcagctgcgaggggaacctgagacccagttgccactgactcgggaggaggacctgatcaaaacagatgatgtcttggatctgaataacagtgacttgattgcatgcacagtcatcaccaaggatggtggtatggtccagcggttcctggctgtggacatttaccagatgagcctggtggagcctgacgtatccagacttggctggggagtggtcaagtttgctggccttctacaggacatgcaggtgacaggagtggaggatgacagccgtgccctgaacatcaccattcacaagcctgcctccagcccgcactctaagcccttccctatcctgcaggccaccttcgtgttctcggatcatatccgctgcattattgccaagcagcgcctggccaagggccgcatccaggccaggcgcatgaagatgcagaggatagccgcccttctggacctcccaatccagccgacaacagaagtcctgggatttggactctgctcctcctcctcctcctcccagcacctgcctttccgtttctatgagcagtgccgcagaggcagcagtgacccgacagtgcaacgctctgtgtttgcatccgtagacaaggtgccaggctttgctgtggcccagtgcataaaccagcatagctctccatccctgtcatcaccgtcgccaccatttgccagtgggagccctggtggcagtggaagcaccagccactgtgactcaggaggctcttcctctgcaccctcagcaacccagagcccggcagatgcccccacgactccagaacagcctcagcctcacctagaccagtcagtgattgggaatgaaatggatgtcaactccaagcccagcaagaactcatcggccaggagctctgagggggagacaatgcacctgtcccctagcctccttcccgcccagcagcccaccatctccttgctctacgaggacactgctgacacactgagtgtcgagtcactgaccattgtccccccggtcgatccccacagcctccgagccctctctggcatctcccagctccccacactgcctgcagcagatacggagaccccagctgagggtgctgtaaacccagagcctgcggaacccacagagcactgagtgcgccagagctctccctttgtgtgtgcggcccgctggtagggaccccccatgcattttgtgacagcaagacacactgggagcacccacaattctccgtggccctgaaaactgcccctcatacctctccctacaagacaaccaccaagcactcatttgctctgacctctcgctgagcaggctgggatcctagaaacggcctcctgtgtagagacgatggcattggccacctcagaggggtctggggccctgcccctgatcctgacagccgcagggggcaggacccactggcaccgtcctttgggcagctcctttgtcttccctcccagtgtgcacagaagtggacaaggttactctgggtagaaacctgtggagaagcaaacctagataagcatctcctcgagctagttatttctggttttggcaacaaatgaagagatttattttaaaagaatctattttggaggaggggcaaaaagaaaaagccctcaacca

SEQ ID NO: 265 - protein, 1027 aa, Mus musculus
GRRQGWSADMFGRSRSWVGGGHSKSSRNIHSLDHLKYLYHVLTKNTTVTEQNRNLLVETIRSITEILIWGDQNDSSVFDFFLEKNMFVFFLNILRQKSGRYVCVQLLQTLNILFENISHETSLYYLLSNNYVNSIIVHKFDFSDEEIMAYYISFLKTLSLKLNNHTVHFFYNEHTNDFALYTEAIKFFNHPESMVRIAVRTITLNVYKVDNQAMLHYIRDKTAVPYFSNLVWFIGSHVIELDNCVQTDEEHRNRGKLSDLVAEHLDHLHYLNDILIINCEFLNDVLTDHLLNRLFLPLYVYSLENPDKGGERPKISLPVSLYLLSQVFLIIHHAPLVNSLAEVILNGDLSETYTKPAQDVPRSSAKPSIRCFIKPTETLERSLEMNKHKGKKRMQKRPNYKNVGEEEDEERGSAEDAQEDAEKTKGTEGGSKSMKTSGEREEIEMVIMKLGKLSEVAAAGTSVQEQNTTDEEKSAATNSENAQWSRPFLDMVYHALDSPDDDYHALFVLCLLYAMSHNKGMDPEKLKRIQLPVPSEAEKTTYNHLLAERLIRIMNNAAQPDGRIRLATLELSCLLLKQQVLTSSGCVIKDVHLACLEIKPMNVEYLMMDASILLPPTGTPLTGIDFVKRLPCGDVEKTRRAIRVFFMLRSLSLQLRGEPETQLPLTREEDLIKTDDVLDLNNSDLIACTVITKDGGMVQRFLAVDIYQMSLVEPDVSRLGWGVVKFAGLLQDMQVTGVEDDSRALNITIHKPASSPHSKPFPILQATFVFSDHIRCIIAKQRLAKGRIQARRMKMQRIAALLDLPIQPTTEVLGFGLCSSSSSSQHLPFRFYEQCRRGSSDPTVQRSVFASVDKVPGFAVAQCINQHSSPSLSSPSPPFASGSPGGSGSTSHCDSGGSSSAPSATQSPADAPTTPEQPQPHLDQSVIGNEMDVNSKPSKNSSARSSEGETMHLSPSLLPAQQPTISLLYEDTADTLSVESLTIVPPVDPHSLRALSGISQLPTLPAADTETPAEGAVNPEPAEPTEH

SEQ ID NO: 266 - DNA, 257645 bp, Homo sapiens
  misc_feature (1)...(257645): n = A,T,C or G
gaggaagggcacccaaggaaagggggaaggcttcctgggctagagccccttcagggtctgacacgccattgacactgaccacgtcattcattaagcaagcaccaactatacatcattcactatcccaatctaatttgcacaagcccttaggcaggtgctactattatccctgttttacagagaaggaaaccgaggcttaggagatgaagtctgaggtgttggtggagctgggatttaaaccaaaatatgtccaactgcaaagcatgtaagtaacaattttagagggtatacggaggtgaccctaagtaacaaggaatcacatatagtgagcaagcaatttgcttttcagtttttggtcaatccttatgattatttagaggagaaagttcagtttggtgctggtatatcttatgtttatcacccgacagttgttaatctctttttaacaaagaatacaggccaaggccctgtgactttagctggctttggtatttggccaaaagttaatgactttggcagttagtgtttttatccatgccaagcgatgatgattttctctttagtgacagacattttttaaaaaataaattcacataaaaaagtagttttacagatgaagcactaaaactagtgcatttcatcttaaactgcaaattataaagggaataatagtaacttgacagtggagagacctggcagacaccaccttcaccaactgatcaaagttaacatcgccagaaaggggacagatggcatgtgcctctcgataagatgcactgaagacacacactcacttctgcaatattcctgccaagaatgcctcatctgaatctaatctcgagtataaccatcagacaaacccaaattgagagacagtttacaaaacaccagccttgtactctgcttaatatgtcaatgtcacaagagagaaagacagactgaagagctgatccagactgaagaaggctcgagattaatgcaaaagctgatctgggattgcatcttggacctcaactctcccctttttattgttaagggacactactgggacaatttttttttttttttcgttttgagacagggtctcgctcagtcacccaggctggagtgcagtggtggaataataactcactgcagccttgaactcccggactcaagcaatcctcctgcctgagccttccgagtaactgggactatgggcgtgtaccacaacacctcgctattttttttttcctactttttgtagagacggggtctcactatgttgcccaggctggtttcaaactcaagtgatccttccacctcagcctctataaaatttgaataaagttgtagatgagattggtcataggattgtatagtgtatcaatattagatttgctgattttgacaaccctactgtggttatgcaaatttgtccttgttctaaggaaataaatactgaattatttaggagtaaaggtgcataatgaacccattttcaaatgcttatgaaaattacacatatacacatgtgtgcatatacacaggcatgcatatacaaacagagggaagagcatgcacgtgtacatgagcaaagtgctaactggtgcaactggtgagtttgggcgggcattgtttgtgctcttgcaacttttctgtaagtgtgaaattacttcataacagaggtttttgtttgtttgtttgtttttaattcaggaaaaagttggaagagtgcgtatgaaataggcctggcagaaactatgagctggtgttccaaggtcggggatggggagccctcactggaggcacccctcaaaccctcagtgctgtggccagggaaccgggctggcagtcttagttggctttgttccctcggcctccacttccccattctgtgcctccatttatttgtgagacagggataaagaggtctgccacttttattgtgatcttaggtttcccaaaagcagagtatgctttcagaagttctgggaggaaagctagcagataaaccagaaatatgaatatccaaattgagagaagccctcactttcttagttcagcaaaacagacacatgagctgtaagtggggcagaccctgcctgtttcttggctgaaatctccagtttgtataattcagggctaagagagcaggactcttgacatctcactgtcttgagacacatactggggttttctcctgtctgaagacgcagctggcaccaatgtaccctatggccaaggaccttctgggtgagcctcatgtcaggagcagagctggagaggtggccaggcctgggggtatacttgcctccctgtgtcaccattgtctgtctcttgcttagatgacagccacagcttcctggcctggtttcctgcatccgccctgacccctggctgtgggatctcccataactcaaatctgactgtgtgccctgtggaaggtttgggtttctgacctgggcagctctatgtccggcacagnnnnnnnnnnnnnnnnnnnnnnnnnnnnnnnnnnnnnnnnnnnnnnnnnnnnnnnnnnnnnnnnnnnnnnnnnnnnnnnnnnnnnnnnnnnnnnnnnnnnnnnnnnnnnnnnnnnnnnnnnnnnnnnnnnnnnnnnnnnnnnnnnnnnnnnnnnnnnnnnnnnnnnnnnnnnnnnnnnnnnnnnnnnnnnnnnnnnnnnnnnnnnnnnnnnnnnnnnnnnnnnnnnnnnnnnnnnnnnnnnnnnnnnnnnnnnnnnnnnnnnnnnnnnnnnnnnnnnnnnnnnnnnnnnnnnnnnnnnnnnnnnnnnnnnnnnnnnnnnnnnnnnnnnnnnnnnnnnnnnnnnnnnnnnnnnnnnnnnnnnnnnnnnnnnnnnnnnnnnnnnnnnnnnnnnnnnnnnnnnnnnnnnnnnnnnnnnnnnnnnnnnnnnnnnnnnnnnnnnnnnnnnnnnnnnnnnnnnnnnnnnnnnnnnnnnnnnnnnnnnnnnnnnnnnnnnnnnnnnnnnnnnnnnnnnnnnnnnnnnnnnnnnnnnnnnnnnnnnnnnnnnnnnnnnnnnnnnnnnnnnnnnnnnnnnnnnnnnnnnnnnnnnnnnnnnnnnnnnnnnnnnnnnnnnnnnnnnnnnnnnnnnnnnnnnnnnnnnnnnnnnnnnnnnnnnnnnnnnnnnnnnnnnnnnnnnnnnnnnnnnnnnnnnnnnnnnnnnnnnnnnnnnnnnnnnnnnnnnnnnnnnnnnnnnnnnnnnnnnnnnnnnnnnnnnnnnnnnnnnnnnnnnnnnnnnnnnnnnnnnnnnnnnnnnnnnnnnnnnnnnnnnnnnnnnnnnnnnnnnnnnnnnnnnnnnnnnnnnnnnnnnnnnnnnnnnnnnnnnnnnnnnnnnnnnnnnnnnnnnnnnnnnnnnnnnnnnnnnnnnnnnnnnnnnnnnnnnnnnnnnnnnnnnnnnnnnnnnnnnnnnnnnnnnnnnnnnnnnnnnnnnnnnnnnnnnnnnnnnnnnnnnnnnnnnnnnnnnnnnnnnnnnnnnnnnnnnnnnnnnnnnnnnnnnnnnnnnnnnnnnnnnnnnnnnnnnnnnnnnnnnnnnnnnnnnnnnnnnnnnnnnnnnnnnnnnnnnnnnnnnnnnnnnnnnnnnnnnnnnnnnnnnnnnnnnnnnnnnnnnnnnnnnnnnnnnnnnnnnnnnnnnnnnnnnnnnnnnnnnnnnnnnnnnnnnnnnnnnnnnnnnnnnnnnnnnnnnnnnnnnnnnnnnnnnnnnnnnnnnnnnnnnnnnnnnnnnnnnnnnnnnnnnnnnnnnnnnnnnnnnnnnnnnnnnnnnnnnnnnnnnnnnnnnnnnnnnnnnnnnnnnnnnnnnnnnnnnnnnnnnnnnnnnnnnnnnnnnnnnnnnnnnnnnnnnnnnnnnnnnnnnnnnnnnnnnnnnnnnnnnnnnnnnnnnnnnnnnnnnnnnnnnnnnnnnnnnnnnnnnnnnnnnnnnnnnnnnnnnnnnnnnnnnnnnnnnnnnnnnnnnnnnnnnnnnnnnnnnnnnnnnnnnnnnnnnnnnnnnnnnnnnnnnnnnnnnnnnnnnnnnnnnnnnnnnnnnnnnnnnnnnnnnnnnnnnnnnnnnnnnnnnnnnnnnnnnnnnnnnnnnnnnnnnnnnnnnnnnnnnnnnnnnnnnnnnnnnnnnnnnnnnnnnnnnnnnnnnnnnnnnnnnnnnnnnnnnnnnnnnnnnnnnnnnnnnnnnnnnnnnnnnnnnnnnnnnnnnnnnnnnnnnnnnnnnnnnnnnnnnnnnnnnnnnnnnnnnnnnnnnnnnnnnnnnnnnnnnnnnnnnnnnnnnnnnnnnnnnnnnnnnnnnnnnnnnnnnnnnnnnnnnnnnnnnnnnnnnnnnnnnnnnnnnnnnnnnnnnnnnnnnnnnnnnnnnnnnnnnnnnnnnnnnnnnnnnnnnnnnnnnnnnnnnnnnnnnnnnnnnnnnnnnnnnnnnnnnnnnnnnnnnnnnnnnnnnnnnnnnnnnnnnnnnnnnnnnnnnnnnnnnnnnnnnnnnnnnnnnnnnnnnnnnnnnnnnnnnnnnnnnnnnnnnnnnnnnnnnnnnnnnnnnnnnnnnnnnnnnnnnnnnnnnnnnnnnnnnnnnnnnnnnnnnnnnnnnnnnnnnnnnnnnnnnnnnnnnnnnnnnnnnnnnnnnnnnnnnnnnnnnnnnnnnnnnnnnnnnnnnnnnnnnnnnnnnnnnnnnnnnnnnnnnnnnnnnnnnnnnnnnnnnnnnnnnnnnnnnnnnnnnnnnnnnnnnnnnnnnnnnnnnnnnnnnnnnnnnnnnnnnnnnnnnnnnnnnnnnnnnnnnnnnnnnnnnnnnnnnnnnnnnnnnnnnnnnnnnnnnnnnnnnnnnnnnnnnnnnnnnnnnnnnnnnnnnnnnnnnnnnnnnnnnnnnnnnnnnnnnnnnnnnnnnnnnnnnnnnnnnnnnnnnnnnnnnnnnnnnnnnnnnnnnnnnnnnnnnnnnnnnnnnnnnnnnnnnnnnnnnnnnnnnnnnnnnnnnnnnnnnnnnnnnnnnnnnnnnnnnnnnnnnnnnnnnnnnnnnnnnnnnnnnnnnnnnnnnnnnnnnnnnnnnnnnnnnnnnnnnnnnnnnnnnnnnnnnnnnnnnnnnnnnnnnnnnnnnnnnnnnnnnnnnnnnnnnnnnnnnnnnnnnnnnnnnnnnnnnnnnnnnnnnnnnnnnnnnnnnnnnnnnnnnnnnnnnnnnnnnnnnnnnnnnnnnnnnnnnnnnnnnnnnnnnnnnnnnnnnnnnnnnnnnnnnnnnnnnnnnnnnnnnnnnnnnnnnnnnnnnnnnnnnnnnnnnnnnnnnnnnnnnnnnnnnnnnnnnnnnnnnnnnnnnnnnnnnnnnnnnnnnnnnnnnnnnnnnnnnnnnnnnnnnnnnnnnnnnnnnnnnnnnnnnnnnnnnnnnnnnnnnnnnnnnnnnnnnnnnnnnnnnnnnnnnnnnnnnnnnnnnnnnnnnnnnnnnnnnnnnnnnnnnnnnnnnnnnnnnnnnnnnnnnnnnnnnnnnnnnnnnnnnnnnnnnnnnnnnnnnnnnnnnnnnnnnnnnnnnnnnnnnnnnnnnnnnnnnnnnnnnnnnnnnnnnnnnnnnnnnnnnnnnnnnnnnnnnnnnnnnnnnnnnnnnnnnnnnnnnnnnnnnnnnnnnnnnnnnnnnnnnnnnnnnnnnnnnnnnnnnnnnnnnnnnnnnnnnnnnnnnnnnnnnnnnnnnnnnnnnnnnnnnnnnnnnnnnnnnnnnnnnnnnnnnnnnnnnnnnnnnnnnnnnnnnnnnnnnnnnnnnnnnnnnnnnnnnnnnnnnnnnnnnnnnnnnnnnnnnnnnnnnnnnnnnnnnnnnnnnnnnnnnnnnnnnnnnnnnnnnnnnnnnnnnnnnnnnnnnnnnnnnnnnnnnnnnnnnnnnnnnnnnnnnnnnnnnnnnnnnnnnnnnnnnnnnnnnnnnnnnnnnnnnnnnnnnnnnnnnnnnnnnnnnnnnnnnnnnnnnnnnnnnnnnnnnnnnnnnnnnnnnnnnnnnnnnnnnnnnnnnnnnnnnnnnnnnnnnnnnnnnnnnnnnnnnnnnnnnnnnnnnnnnnnnnnnnnnnnnnnnnnnnnnnnnnnnnnnnnnnnnnnnnnnnnnnnnnnnnnnnnnnnnnnnnnnnnnnnnnnnnnnnnnnnnnnnnnnnnnnnnnnnnnnnnnnnnnnnnnnnnnnnnnnnnnnnnnnnnnnnnnnnnnnnnnnnnnnnnnnnnnnnnnnnnnnnnnnnnnnnnnnnnnnnnnnnnnnnnnnnnnnnnnnnnnnnnnnnnnnnnnnnnnnnnnnnnnnnnnnnnnnnnnnnnnnnnnnnnnnnnnnnnnnnnnnnnnnnnnnnnnnnnnnnnnnnnnnnnnnnnnnnnnnnnnnnnnnnnnnnnnnnnnnnnnnnnnnnnnnnnnnnnnnnnnnnnnnnnnnnnnnnnnnnnnnnnnnnnnnnnnnnnnnnnnnnnnnnnnnnnnnnnnnnnnnnnnnnnnnnnnnnnnnnnnnnnnnnnnnnnnnnnnnnnnnnnnnnnnnnnnnnnnnnnnnnnnnnnnnnnnnnnnnnnnnnnnnnnnnnnnnnnnnnnnnnnnnnnnnnnnnnnnnnnnnnnnnnnnnnnnnnnnnnnnnnnnnnnnnnnnnnnnnnnnnnnnnnnnnnnnnnnnnnnnnnnnnnnnnnnnnnnnnnnnnnnnnnnnnnnnnnnnnnnnnnnnnnnnnnnnnnnnnnnnnnnnnnnnnnnnnnnnnnnnnnnnnnnnnnnnnnnnnnnnnnnnnnnnnnnnnnnnnnnnnnnnnnnnnnnnnnnnnnnnnnnnnnnnnnnnnnnnnnnnnnnnnnnnnnnnnnnnnnnnnnnnnnnnnnnnnnnnnnnnnnnnnnnnnnnnnnnnnnnnnnnnnnnnnnnnnnnnnnnnnnnnnnnnnnnnnnnnnnnnnnnnnnnnnnnnnnnnnnnnnnnnnnnnnnnnnnnnnnnnnnnnnnnnnnnnnnnnnnnnnnnnnnnnnnnnnnnnnnnnnnnnnnnnnnnnnnnnnnnnnnnnnnnnnnnnnnnnnnnnnnnnnnnnnnnnnnnnnnnnnnnnnnnnnnnnnnnnnnnnnnnnnnnnnnnnnnnnnnnnnnnnnnnnnnnnnnnnnnnnnnnnnnnnnnnnnnnnnnnnnnnnnnnnnnnnnnnnnnnnnnnnnnnnnnnnnnnnnnnnnnnnnnnnnnnnnnnnnnnnnnnnnnnnnnnnnnnnnnnnnnnnnnnnnnnnnnnnnnnnnnnnnnnnnnnnnnnnnnnnnnnnnnnnnnnnnnnnnnnnnnnnnnnnnnnnnnnnnnnnnnnnnnnnnnnnnnnnnnnnnnnnnnnnnnnnnnnnnnnnnnnnnnnnnnnnnnnnnnnnnnnnnnnnnnnnnnnnnnnnnnnnnnnnnnnnnnnnnnnnnnnnnnnnnnnnnnnnnnnnnnnnnnnnnnnnnnnnnnnnnnnnnnnnnnnnnnnnnnnnnnnnnnnnnnnnnnnnnnnnnnnnnnnnnnnnnnnnnnnnnnnnnnnnnnnnnnnnnnnnnnnnnnnnnnnnnnnnnnnnnnnnnnnnnnnnnnnnnnnnnnnnnnnnnnnnnnnnnnnnnnnnnnnnnnnnnnnnnnnnnnnnnnnnnnnnnnnnnnnnnnnnnnnnnnnnnnnnnnnnnnnnnnnnnnnnnnnnnnnnnnnnnnnnnnnnnnnnnnnnnnnnnnnnnnnnnnnnnnnnnnnnnnnnnnnnnnnnnnnnnnnnnnnnnnnnnnnnnnnnnnnnnnnnnnnnnnnnnnnnnnnnnnnnnnnnnnnnnnnnnnnnnnnnnnnnnnnnnnnnnnnnnnnnnnnnnnnnnnnnnnnnnnnnnnnnnnnnnnnnnnnnnnnnnnnnnnnnnnnnnnnnnnnnnnnnnnnnnnnnnnnnnnnnnnnnnnnnnnnnnnnnnnnnnnnnnnnnnnnnnnnnnnnnnnnnnnnnnnnnnnnnnnnnnnnnnnnnnnnnnnnnnnnnnnnnnnnnnnnnnnnnnnnnnnnnnnnnnnnnnnnnnnnnnnnnnnnnnnnnnnnnnnnnnnnnnnnnnnnnnnnnnnnnnnnnnnnnnnnnnnnnnnnnnnnnnnnnnnnnnnnnnnnnnnnnnnnnnnnnnnnnnnnnnnnnnnnnnnnnnnnnnnnnnnnnnnnnnnnnnnnnnnnnnnnnnnnnnnnnnnnnnnnnnnnnnnnnnnnnngaattcgctctgcgtatcgaatagggggaggtaaaagagactgaacacagttcaaacctagacataatgctaaggccgcaaaagccgaaggaaacccgggctaccgctgcgccttgctgcatgcctctttgggactccgtttctcctttaaaaggaggcggggtcggggaggggcgacggacggttgccctggaaattttggacattcccaaagcgccaattttcatggtggagatccaccagtgtccccttcgcttctccaaactctggttgctggaaggtccgcccactacggaacctgcatcctagagttaaggaacacctgaataaagagattccgaggtagttcagatcttcaaccataaggatgctttttgtttctttttactttgtgaatcatgtttaaaagcaataatacacatggctaaacattcaaacaaccgtgaagtacacagaaaagtgagtctctcccacccactggttcccctgctcttgggtaaccgttgcatgtctttcaggaaaacatgatctcgcccaaagagccttccaaagcagttcaagaaacctttaaatctcaggccacactgagctgagtattttacatgcatcgcttaatcggaggtatacaaggcagtgtagtatgtatgtgcgtactttttacagatgaaaaatacgagcccagggatcctacatttctgagcctgggtgtgtttctttggaggccagatcctgttcttttttgctccatgactttgtcttgccccactctatatgaattacaggacaaaccattaactctccactcttatccatttctccaactgctgaaggtgaaacaaacctttactcattcatgcactctaccaatatttgttaaacacctgctatgtgccaaaccttgtgctaggcactggggagaacattggcctctggcccagttctttcttgagcagagttaatgggacacagtggacctttaataaggttgatatgtagaagtgactgaatgaatgaatggatggtaaacttgagaagtcttgcccacactgaacttaccacttctaatccagggtagaagttagatatattctggctcatgcagaaagttgggtgtttcctttttcattttaacgtggtactttgggaaatagcatggattctggctgaagaccagaggaatcctctggaagtacaaaatgttcagtttggtgcattgttgcatccagccttttccaacacacacacacacacacacacacacacacacacacacacacacacacttaattgaagtggaaaaagaaaaaggctgtcaggacaaataaggttgttatctagtgccgttttggtttataaagggaatgaaaaataagggtgcgtgcgtggttatgaaccctggttttgccacttgttaactgcatgatcttgggtaagtcaacctctcagtgactccgtttccctgatgataaaataggttcgataatagtacccaattcataggatggttgtgaaaattaaataccttaatatgtaaagcccttaggatagtggctttgcatagtatacaccatccaatactattcttattcttattataaatctagtaattgttactacagtggtgactttccttgacccatctacgccgattccctctccgggactgcgcccaaagcttccaattcccgcccacccggaggattctgcggtcgctcctcctctcgccccgccttttgtggatggccgtaggcccgcggttgcacgatgcatgccgggccttgtagtccgttcgcggagtcctgccgccgaaggccacgcgggtgaactgcatttcccagcgccccacgcggcggcggccgtaaagcgcggcggtcgaacggccggttccggctgaatgtcagtgctgggctgtgggccggggaggaaggcggctcgcggttcctccaccgcctccgccgccgcatcctccgcttgtgctaccgccgcgggcgctgggccgctctgctggtccggcatgagaccgtgagacgagagacgggtcggggccgccgacatgtttggccgctcgcggagctgggtgggcgggggccatggcaagacttcccgcaacatccactccttggaccacctcaagtgagtgtggggggcgtagcgggaggcctcggggctggacagggggacggggcgccgagctccgggtcggggctctaggaggcgtgagagcggcggcgaagggcgcccggggaagcccgtgtggtggttaagagcgagggctcgggagtcagggcgcctgggttcgaaccctgaccccgtcgctcttggctgtgtgaccttggacaagtcgcttaatttctcagagtctccgtatccccacctgtaaagcgagaggatgcgatttcagtttatggacacagactttgttcttgacggtgtccaccaagtttcctggcggggtacttcttaaactgaacagcttagagggtcaaaggcctgggtcctggagtcgggcagatctgggtccgaatctatctgtgtgaatgtaggcctcaggttccccacttgtaaaaagagtagagtgacagcacctgcttcctgctattgtgttgagagttggttggataagagaatgaacgttaagctcagaacacgtacaattgctcattaaacggcattaattattataaaagaacagattattttccgaggggagtctaagctgggggcatgcacgctgagacccaggattttggggcgattggggaggatgatgaaaaatagagacctctgaggagggaatgactctacagctctgggggaggacaggtggcagatagggtcttgggaccaggagtgcagaaattaagaggctggctttgcagccacacctgcgttcaaatcctgaaaccaccatttactggctgtgtgaccttgggcaaattacttcacctctctgagcctccagattcccatttgcaaatggggatcgtgaacattgtaatggaaatggaaggtgactgacccagtaggtacatagtaggtggccagtagtggtagctgtgtttattatcagctcagcgaggccttcccagaccaccctacctaacgtgctccccccatcccagttcctatccatcacatctttctcttgctttcattgagtgcttctccactgtctgcgattattctttattttttatttatacttattttctgtcttctgttaaactggcacttcacgagggcacagactgcttggtttgttcacagttgtattcccagcatctaggactgctctctgcttacttaaagagtggaaaaatgaatgattgaattggggagagatgaagagcatgcaggccaggacccaggatttgggggcaggtgtggaggatgatgaaaaatagagatctgtatgaagggaaaggctttagggagggaaatggcggggatgctgaagaggggagtagacaaatcttcagtgtcaagaaataggcaggtttccagaaggagatcctgagactactaatgggaaaggaggaagatagggttagggatatggtgggaagtagtggaagggagacggggctgtggaaaggattggtgggagggaattagatagggacttctcatgtgtccccgggagtggggtaggggtagtggcagggccacagttctcagctgtgacctttctagcatggagcagcatttagtaaacgtttgtgagtcttgaagagtggggagcaggagggttcactatgtggtgaggggcacttttagagcaggaggtggtgagagaagacaaggggaggaaagaggcccaggacaagtctggggtgggtagggaggtggggatcttagatgggagggcagctggccgggaaagggagtggttgaaggatttcaggaatttatcgagtgggcggaggtggctgaggaggggaggggagttatccagaggaggttgggcctcctgccggcatccaggtacctccaggttctcacctaactctgcttaactctagcccttttaaattaccttaatttattaatttatcgaatgcattattctgtaccaggtatttgctaaggactgcctgtgtgttatttcccttagtcctcacaagtctgagttacaggaaccattattgtttccattttacggaagtggaaactaaggttcagggggcttcagtgacttgcccccaggtgtcagcagctgaagggtaccagaggcaggatttgactcccgagcttgtgctcattatactgtctttctgaataaaacttcccaataagtctgtttgagaacacttttgacttggctgagtctcatcgccaatggggcatctttgccagccagcagggaatggtaaacggtctctggttcctttgcagtatcctgggaactgcctgggttcattgtttagatcacatgtctatcggatgcttctttggaaacccaagttgcctgccctgaatcaggcagatcagcttaatccatattacagccccaagaacctgagatttgtgtattggtgggggggttagaagatcccccagtgacttggaaaagagttttgtaaacagccagtgcccaccctggggcttgtgccactctgcatttggctctgttggtaaacatcttgggtcttgggtacagaacagctcgttccctgagggagtttgcaggctggtgggggagacagctgtagagccagtgactgtacagtgtgataagtgctgagatcgccatggacccagggttctgtgggaacccttattgggagctttctggaggagacaacaccagcgcgggttctccaagaatgaacagaagccaccattggggggcagcaggggcgggaggcggagcactgtgaccaggaccctgcgggttttgtggcatgtccaggtgggggctgatagctgtgggaaacaaggctggaagtaggaaggggcttgggatttatctgacacttcgggtgaccaaccgtcctggtttgcctgggctgaggggtttcccaggatatgggactttcagtgctaaaactgggaaagtcctggacaaactagtataaactggtcaccctaccagtgacaagtgacagttcttaatacactcttaccttgacctagagcagtatggatggagagggaaagtttaagatagttaaaagaattatttatttattattattattttttaaatacacaaggcatctggaaaccctcttctttttttttttgagataagagtctcgctctgttgcccaggctggagtgcagtggcacgatcttggctcactgcaagctccgcctcccaggttcacgccattctcctgcctcagcctccagagtagctgggactacaggcgcccgccaccacgcccagctaattttttgtatttttagtagagacggggtttcaccgtgttagccaggatggtcttgatctcctgacctcatgatctgcccaccttgacctcccaaagtgctgggattacaggcatgagccactgcacccggcctagactttacttttttagaacagtttgagatttacagaaaggttgagaagatagcacagagagctggaaactgtttttagcttcattattctttgtaacactcccagcttgcaaactggaaaggaattttcctgttagggttttgcttttgctaaatggtagaaaacttcatacctgtggtctctgtctgctgaactgagttagtgatttagctcaggcagattgaagtagtcaagaggttatttgctacacaccatgggtggtttattgtccagattagtggcaaggctgtgacattgactgacaaatgtccaccaccaagcggaagcctgagtgatggaatcgtttgattgctactgaaacatcatctttaccagggactgcaagtctgcggctggtagaaattggtcgtttttgtattgtggccttcattctggtccactttgtgtgggggtcaagatttttggttccagtgacagaaacccagctagaattgccttaagcctcaaatggattgaatagctcatgtcactgaatggtctgtccccgctaaaccatggctgaatccaggtgtttggagccgtcagaaatcggcctttttccacctttcagctctacctttttcctgttggtgtcattttcaggcaggctgcaggcttacatcatatcagcttagcattcctgaggaaaaagagagcttcttttctcaatattgccagcagaagtccagaattgagattgagtatccctggaccagcaaggtctcatgccacccctgaactgtcactctggccaaaggtatagggggatctgattggccattcctcactcatattcccttccctggagcaagagtgggattagctccactcaagctagtggaaaagaatgagagaaaagggtggttccccatgggagaatcaggggttattgcccaaagaaggcggagaatggatccatggcaggtagacagacgcacacctactcttggtgctttcaagttttggctaaggtggcactgacagtgttagagcttggggtacaatattgccatgttgattttcttaaaatatcgtcttcaccatgccacatattatgggtcctaggctcccactatgtcacgtctaagttcttccaggccttcccaccatctagtttgggagcacagggagttaggaacatccttgttaggcagacgctgtttaaatggagaccaacggggtgagtcgttgttaccaggcagcggggtgtcaggtggaaggaaggatgtttcaggcagaggaaaaggcatttgagaaagcctagtggggcaaggggagcagtgcacattggcagaactcacgtggttcagcaggggagtgttcactgggtgaagaggaagtgaggacccaagctcagagccatgcttggcagagtctccagaggccaggtcccctggggccctgtaaatcactttaaggaattcagactatgagtgagaacagtagggagccactgaaggttttttaactacagaaaggctgtggtctggctgaagctggcagaatggattggatgaggggcagactggaggtgggcctccacatgtgttggtggggcggggagcaggggctctgctgccgtcccctggtgagttacggtagcagctgctgtcatccaggtgtatctcctgttggtggtccactcacacacatacctcgcctgcccacttgaggtcccctgctcttttcctcctgcccatccaaatccctagctctatcccgaaaatgccagttcttccctaaaaattgccctggtgacttcagccaacaagagttttgctgtcttctctaacttcttctgtgcctgttcacactgtcccacacagttaacacattattatatacttctcatcgccaaagagtgggtcggctgttagctcctgtgcgttcttaaagtttcatctcggccttgagttagaccctcaggaagctggccggggttcctgtcctttggctatcagacattgtcttcctttgttacatatcttttttgttgttttctcccaatttgaacataagaatcatgaaagcctgtatggcttgttcagctgggtactggtatgccagcacaggacgtggcagatagtaagcaatcaacaaatatttgtcacaggatgaacgagaggcagacctctgttttcagaaaaggccagtcttttcccaacaactgcttgttctccccagtttagtcacagcacctgtgccacagccatgactttctctagggctaaagccctaaagaaagctagggtatagccctgcctataccctacacatccccggcccagcctcacttgccggccctgtttgacatctttgggggatgattcaccaggggaagcacagcctgtgaacaccttctctaatcctctagcctgattccaccctccgtgaagcttctccttgtcctgctggccagaaggctgaacactgaccagatggtggttttcagggcacagagtgggacacactggggaacgtctgcagggcctctgcccgagtgctgaacaggccagacagatacaggctctgtgtctcccatccctctaccacacctgagacattgttatttggagctgtgtggacattggggggtaaatttctaacccccagacctcctatcattctgcttatcctttctcatgccccaccttgcaaatgtacatttcaaaatcttgaaggaggagcatcctaataagctcattatggtgcaaggcatagcacgtgcagaaaatgctgtcactgaaatgaacttggacctagtattcctgtctctgaaatggactgaattgctaatttttgaaggatatggggcattattaactgtagtggtttaacctgtgaaattagtgactcttgagaaagcagaggctattgaggccagatttgtttacgtctgtcatccttggtgatgcacctcgagtgtgttggttacagtttctcttctccaggcatttcaaactctgaagctcatctgtcggtggagagttagctaacaggcaaagctcggatattgagactgcatctgcagagctcctgctggggatatgagaatactggctcttttccagacaaatgggagttagagccttttataaggactttccataagatctgatagtattttcatgcctttttggtttatctatttggtgtttttttaatttattttttgtgtgttaggcattcataacctcatgtaaattcttggccaataaaattgttgcttacttcattgtttgcatttctgtagtcctagaagggttgtaatcatggggtctggagttcagtctgcctggttgtaacctaggcacctcctgtgctgcaccagggccctgggcagatgcctcagctcccagagcatcatccccaaagggtcgattgtttctgggattaaacgaagcactcagacagagactggcagtaataggaagcttcatctgttttactgaggtacatacatagtttgagaaaacacgttgtcattctaacagtggttatcattgtaagagaaacattttaatttgctgccgttaagtagcaaggtaattattctgtcctttgaaacttttctgagataaagacacagctttccatacaaagatggtcatagcaacattgttatcactcacacaattaggaatcttaatgcccttcaaaagagttgctactgtgcttgtcctttcagtgtcatactgtgtagccattacagatatttgcaaacagttgtcaataaccaaaaaaagtgcttttgttttagctgaggtgggaaataagattggcactgaaatggataatgcaacatgacctcaactatgtaaatatccatagcaaagaaaaagacccgaggaaatagattgcaactccagcagcagtcatctctaggcaccacggttgccgtttctctttcattgttgtcaaagtttcctacttctctaaagtgaatgttacatttataatcagaaggttttattaaaatgggccgggtgagttggctcacacctgtaatcccagcactttgggaagccgaggcaggcagatcagttgaggtctggagttcaagaccagcctggccaacatggctaaaccccatctctactaaaagtacaaaaattagctgggcatggtggcctgcgcctataaactcagctacctgggaatctgaggtaggagaatcgcctgaacctaagaggcggaggccgcagtgagccaagatcacgccactgcactccagcctgatgacagagcaagactccatctcagaaaatgacaacaacaacaaaaagttattaaaatgtttatatctctgaggtggttgaattacctaatcttccaaagccctggaattagatacaccattaaaacattaaatcttaatccattcagcctttccccccattacattcaagcaaatgtatattgagcatctcttcctaaaacactgtgtaaaacggtgtgccagggcattgtgggacagaaagacgagcaaggtgaaggtgtaaccctcattgagctttggagcttgcagtctactgagtatttctgtataccagcaaaagacatttagaaaatgaatatttgaaacaatatcatttacaatagcataaaaaaatgtcgactacctagcagcaactctaacaatagatctgcaagattcctgtcaagtgagcatggaaacaaatgctgtaaatatcagaatgttacactattgtaaatatgtcagttctctccaaatttggccatagatgtagggcaagtctaagaaaattttagcacgtatttttgtggaaatgaagaaggtgatttttgaatgtatatggagattaaaagggccaagaataggcaatattgaaaaacagaaggaaagaagttggaagacttaattactatatggcaagatttactgtaaaactgcagtaatcagacagtatggtcttgatacaaggatagacaaatagatcaatgaaactggagtatccagaatgagacccacatgggtagtcacctgattaatgacaatggtggcgctggagtgcagtagagaagtgagggccttttctgtaaatggtgctgggtcaagtagatttccatatagaaaaacttaattttggccagtacctcatatcctacacagaaatcagttccagatgtactcaaagtcagaatgcgaagagtaaaacagtaactttgttagaagtaaaaagcatttccttataaccttggggtaggtaagaacctcttaagcttgatacaagaaacaccatccaagggaaagattaataaattgaactacattaaaattaagaacctctactcatctaaagacccagtataaagggaacgaaaaggtaagccaccatcagagaaagtatttgcaatatttatctccagtaaagggtttgtggtcagagtatataaagaaaagcaagaaaaagccacacagcctaattttaaaaatgggcaggctaggcgcggtggctcacgcctgtaatccaaacactttgggaggctgaggtacgtggatcacgaggtcaggagatcgagaccatcctggctaatacagtgaaaccccatgtctactaaaaatacaaaacaattagccgagcgtgctggcgggcgcctgtagtcccagctattcggaaggctgaggcagggaaatggcgtgaacccaggaggcagagcttgcagtgagtggagatcgcaccactgcactccagcctgggcgacagagcaagactccgtctcaaaaaaaaaaaatgggcaaaagacttgcacaggcacctcacaaaagaagatattcaaacagtccataaacatatatgaacaggcacccggtttcactactgaaagaaagcccccacgcaatatcactgcatacccagcagatggcgccaccgaccagggcaaagaacaccaagtattgagaggccaagaaacaaatggagttctcagacctttcttcctggccacaggtctgtgggcgagctactgaacgtcgccaaacctcacttgctgtcttgtcctgtgcagtggcaacagtgtgcacatcttcaggttactgtgagtctgtaggtcacatgaagccctcgcagagaaccaggcacgtgggggctcctagaatctttttttcaggacttaccgccctgccctctctgcctataagggccttctggtagttactaggtctttttcccccagaaattatttaataagggcaacaataacaatagctagcacttgtatcatacatagtaactgccaagttagttatctgttatctcccaacaccaccaaaataggtagatactaaagtattcaggtaccattgctgtttacattttactggtgagacaactgaggtgcacagagggaaagtaacctgctcaggatcacccagctaataagtgatggaggtgtgctcagacccaggcattccagtgtctgtgattaaccctatgttctaattataccagtgtttgtaattaaccatatactctagtgcctctcaggaaataccagactttctctacttcctgctctggtttcgctgaaccttcccatcacgactcctgccctgaagccctctttccctgtttgaatctagcctgatctcttttctaccttcctggaatattccttagataatgtagtaataatgtgaataacggcccccaccacaatgaccataatctaatcaccatggcagccaagcctgcttctgttgagcccttgctctgtgccaggcgctgtgcttggctctttctgtgcatggtcacgttgcctctctggaacaacccagtgaggaagccttgactgttcccaccactgtgtagaatctgagctgcagagaggtgaagcgccttgtccaaggccacagttaggaggtggcagggccaaaggtcaagcccaagtctgtctgccagactccgaagcctgacctcttcaccagagctctgtgctgtcacttgccgtgtctggcgtttggatccctggctatgttcagtcgtgtatgctttgatctaagttatgtttacaaagaccatcccctgccccattcagcatttattgaacacctgctgtgtatcagacatttggagtgtattggggtcagcaagatcaataaggtgatggtgctgaccttgaggagctcaggtctagtatgggaggcagatctttgcaaatgagggtgggctgtgcagtagcaaatatgtgtgggtacagaggtgccagtgaggagggaacaattaaatccacctgggaggggggcatggggaacgctttaccaagagatgcccgagctgggttttgaaatgtaaaagtttgctggatgacaaggacagcaagggcattctaagcagaaagccccatcaattgaagtcatgtggtcctaaagaatttaaaatttcttcttcttgttggggatcttcagagcagacccacccacctaagccaccgtctcccattgaccaggagtatgatgtgtgatgctaatagatgtacacagaagagaggagggagaatctgcccttctcccatattgccaacgatgtcttgtcactggcagggtgtcaggcacatgggggcctgcgtggagagtgtcactgatggccacagctggagtggtgcggtgactgtcagacttcagtgggattggggccctgcaccaaaagtccaattcaatgggtctgggacaacttacaaaggtgattctgatgcaggatgcctgggaactgcagtttggaaaactctgccgtttgaaactcttggggaagatgcacttgaggcaagatgaagatgtagatttgggagtgggtcctccaatgattcatcccagggtggttcaagtgctgtttgagttacctaattatagagggaaactgggcccatgccccctcccgcagccttttggtagatttgggtacaagtggttgaggatttgtgttttttgagggctcttctaattactgcatattaaaaattacatgcaatttctaataaattaattaaatgcttgattatactaggtctttaaagcataacaaacagtattcgtaaataaaccctagcccctttaaatagcagattgttctttattgtttcatcttcaggctgcttcctctttatgtcttacccgtttttagagattgtagatgggacaatcctatctagacgtttccttccttgctctcaccagacccccagccctgaaaactgaagttagccataaaagaaatcaggagaggagggcccttttcctgagtcacttcctcttggtgtctgcttttccttctcaagcctgagctcccttgacaggtgaagttacctggggctgtgggccctggagaagccatcttaaaagccgtgcccggtggcactcccagggcatccagctaggcttctggtccccgcgctgctcaggactggcctcggtgattcttttggtctcccccaccagcaaagaggccttgaggactggaaggtgtctacctgtctcagctccagcacctggcattcaggcctgtttgggtagatgaagtacagcaccatagcctctgcagcccttatttatttatttatttatttatttagactctcgctctgtcacccaggctggagtgcaatggtgtgatctcggctcactgcaacctccacctcccaggttcaagcaattctccctgcctcagcttccagagtagctgggattacagacttcgccaccacacccagctaatgtttgtatttttagtagagacagggtttcgccatgttgaccaggctggtcttgagctcctgacctcaggtgatccacccaccttggcctcccaaagtgctgggattacaggcatgagccaccgctcccagccagcccatttaactcagtgaatttaacaatctgttctcagcaaataagaccattgcccttgggctgcaaaccacccagatcatttgagccataagttctgatgggctcactgcacttgagaaggattgtgagcattccaaggggaattgcatgtgatttttgtcccagcaactgctgtgggacccagccttcctaagctgtggctccatctctctaaacctcaacattagcctggctgcaggccccgtgttaggcatccagcctgagctgtatgtccccacttgctctgaaggcatcaacatgatgggaagcatatgaaacaggtggctacttgctcttctctcagtcctgctgaatctgaatttccgagggggctccaggagcccccacttgattcagttctccgggtggttctcttgcacactgcagtttgagagtagttgacttcaagggtttgacgattttcttgtctccgtctgggttggtgtgtccttggtttaacccttcaaagcattgtctgctatttttctggggttgtgagttacatctaatctgaatgggaaattgcattacccaaacctgaaaaagcattgctgcattgtctccaaaatattgctaatggtcatggaacttggcttgcatttcagttggtaacctttaatttccttttctctcatttctctcaggtatctgtaccacgttttgaccaaaaacaccacagtcacagaacagaaccggaacctgctagtggagaccatccgttccatcactgagatcctgatctggggagatcaaaatgacagctctgtatttgagtaagggtttctaatgattgctgttctttgattattcttctttgaatgtttttctaaatgtatactatgagtcattctggatgatgtcaggatttgacgctaatttgatcttgcctagatatctatctctgtctagctgtaaaaaaaaaaaaaaaaatgcccttgaagcactatagaaatgcaagccaaaaatggggaagttatggaaatgagtgtctctagaaaacctgaaaatgtcatgggtaattttccttcaggttgtgtctgattattttcccaaaggaaggagaacatgtctggtggttagatttgacatgaacagaaggcctgtgccctgggggagtccctgagggctcccagttaccatgtttactgatgaccaggcacagggctgagctcctgatgagatggtccacctaagtttcccacccaccccatggtagaggccctgttggtgtccccttttttgctcaaggtcacatagctggtaagcggtggaaaagtgacacacccagaatcagtgaggggtcccgcaactcaccacttcctaggtgagcagtcctcagccaggctcttcatctccctaagcctcagtttctttacctttaaaagagagagaaaaagttctctttgtctagtgcctggtacaggaataaatgatagcaaatgataaagacagacatgcctcactggacagttaaaaagcaagggccgccaggcgcggtggctcacacctgtaatcccagcactttgggaggctgaggcaggaggatcgcttgagcccaggagtttgagaccagcctgggcaacatacagagacctcgtctctacgtataattaaaaaattagtcatgcatggttgtgtgtgcctgtgttcccagctactcagaaggttgaggtgggaggattgcctgagcccaggaggtccaggctgcaatgagccatgatcttgccactgcactccagcctgggtgacagagtgagaccatgtctcaaaaaaaaaatagcaagggctgttaactgtgaactacctccctaatagatctgccttgatgtcttagtgcagaaggatttggggctgggttatgacaaccactaaacacgggtgtgtgtgtgtgtgtgtgtgtgtgtgtgtgtgtgtctgtattataaatactgaggccacttttaaaactcatttttgaaaagtaaaagtgttctatttttaacctggtttcttattagatatccgaataagaaggatattaccttttcatggattcagacagaattaggcagcactgagcaagttcctgaatataggttcagggtagctttatattttcatcagcaaggttatccaataaagctacttgtggaaatgcagactctttaaaatgcaaacctgtaaacagtggctatgatctccaaagcagaacatgcgagtcatgaatttgtgtttatatacagacctagttcctttaaggatccatggggaattttgttttttttgttttgtgagatggagtcttgctctgtcatccaggctggagtgcattggcgggatcccggctcaccgcaacctctgcctcccagtttcaagcaattctcctacctcagcctctggagtagttgggattacaggcatgcaccaccacgtggggctaatttttgtatttttagtagagatggtgtttcgccatgttggccaggctggtctcaaactcctgacctcaggtgatccaccagcctcaggttccctaagtgctgggattacaggcatgagccaccgtgcccagctggaattttttttttttaaatatctttttggaaatcaaaaagacccttgggttaaagatgagaaactgtgtcccccttgactagaatggacttatttttttttttagagacagggtcttgctgtgttgccagggctggtctcaaactcctgagctcaaacgattcttcctcctcagcctcccaacatgctgggattacaggcatgagctactgcaccctgcctagaacggacgtgtcattctaggtcccaagatgacaccctgtccatctgtcatcttagaaaagctgctgagctcttagggtctccatgattcttaaacagttatccaacaaagtccctaagaaaattttgtttttactacattttaaaattttggaataattttagatttataaaatagtttcgaagatagtatagaatgttcccattgtaagtgtcttacattactggggtgaattgggcaaaactaagaaactgacattggtacagtattgttgagtcaacttcagccctcatttggattttgccagtttttcattaatatctcctttctgtcctagcatcccatccatgttcccatagtacattttgttgtcgtatatccccagcctctgatctgtgactcttttttagtcttccattgtttttgccaccctgaaagttttgagaaatgctagccaggtctcctgtggaatgtctcccaatctgggtttgtctcatgtttttctcatgattaaactggcagttaaggggaagaaagctataggagtaaagttcccctctcttgccatcatcacaaggcattcacaatatccacatgacatcctggtgatgttacctttatcacctggttaaggtgctgtctgccaggtttctctactataaagctactgtcttctcctttccccacactgttctttagaagagagtcaccaagtctaccccacgttttcatgatgagggggtgggggttaaggtctaccttctagaagggggcagtatctacatgtattatttgaaattcttctgcatggaagattcatctcttctctctcatttatgcagtcatttgcttatattaatatggactcgtggatatttatttatactttgggctataattcagtatgttgttattttattgctcaagttgtttcagccttggctattaggagctctttcaggctggttcttgtatcccctcgatatgctctcttccttttgttttttgagcacttcttacttcctggtactgtaaaatgctccagtcctacaatcacccttttttcccaatgaattgcccactcccctatggagttttaaaaaatctaggttcatggattttatgctagacctaccctgtcaatccccggggcaagatctaggtacaggcattttaacaagttcccaagttggtcacagtgcggcagtgagtttgctggtggcccttaggagtcactgatttatgcagcttgaactgaaggtagacaaaaataggccaaatgacagaaatactctggaggtcaacatgaatggcatttacaggcagatgggcctccgagttggagaagattgtaagggtcttttttaggccatttaaattttttcatttatccgttcatggattcagacagaatcaggcagcactgagtaagttccaggcccatgacctcaccactgtggagatgccagacgaggacagagaggcacccacaactgagtcagcccgcaggcacacctcatttcttccaagtgtcccagatgcaagattatctggtgttagcttgagtacagagaacacataactagaaacgtcattctcttcctttagagaaaggcactggatggtctgtttccttttcaagactgaaagagccaacgtgtacccccagaagccagtgccgctaggctgtgtacagacaagtatcctatccacaaggagaaaggcagaaacagacctggggatgggttagtagggtttctccaccacatcagtacctgtgtatttctttctagttattttcccctagaacttgacaatttgggagccacagtacatttggttgtcatatctccccagcctcctctgttccgtgactcttttttagtcttctgttgtttttacgaccctgaaagttttgagaaatgctggccaggtcttctgtggaatgtcccccaaaatgggtttgtctcacttttctcatgattaaactggcagttaaggggaagaaaaccgtagggctaaagctttttgggaacttttttttcttttttttctttttttttttttggctctgtcacccaggctggagtgcagtggcctgatcatatctcactgcagccttgaactcctgggctcaagcggtcctcccaccttagcctcctgagtagctggcacttcaggcatgcaccaccgcctaattttttttttcttctctgtagaggtaggggtcttgttattttgcccaggctgggtcttgaactggcctcaagcgatcatcctgcctcagcctcccaaagtactgggattgcaggcatgagccactgtgcccagatctaaaactcatttaatactcataattatatcttattcctttgctgggaattccagttgtggcgggtgacaatgggtggcatgacctgtgcagataccttgggggagaggggtgaatctaatacttgtgttgtgaatgaaaccagataataatttctgtttccacatgtggaagcaagccactgatgcttttccattctctccccagcttcttcctggagaagaatatgtttgttttcttcttgaacatcttgcggcaaaagtcgggccgttacgtgtgcgttcagctgctgcagaccttgaacatcctctttgagaacatcagtcacgagacctcactttgtaaggacattccttggtatttgcctctgtgctgctgtgcatgtagcagggtgaagttgggcgtggttttctgtgtctgcgcttactattcgtcggctcaggctatcctaacaaaataccatagactgagtgggttaaacaatagagatttgttttctcactgttctggagcattgaagtccaagattggccaggcatggtatctcatccctgtaaccccagcacttaggaggccaaggtgggcagatcacttgagctcaggagtttgagaacagcctggacaacaaggtgaaaccccgtctctacaaaaaaccacaaaaattagctgggtgtggtggtgtgcacatgtagtcccagctactcaggaggctgaggcaggaagattgtttgtcaaggaagtcgaggttgcagtgagccgtgattgtgccactgcactccagcctggggtgacagagcaagaccttgtctccaacaacaacaaaaaaaaaagttcaagatcaagttgccagcagggttggtttctagtgagggctctcttcctggcttgcagacggccaccctcttgctgtgcatggcctttcatctgtgtgtgagtggagagaaattgagagagtgctagctggtgtctcttcctccttctatggggacgccagtcctattggatgagaacccccacccttatgacctcattaaccttaattacctcgccaaaggccctgtcttcaaatacagccacaatgggggttagagcttcaatgtaggaacctgagggagacatagttcagtccctaagcctgtgtttgtttctgtgtggtgggtactatcagagggttcccctctgctgatgatgctgggggtgtttgcagttcttctttatgacttgctattaaagagttggggtcgctgaatcatcagccaatggaataagcactggaagaagtaagacaaggaagatctctgccagagggcaggcaagggtgtgtgcattggtaccaaccctcctgcttcagtccctccacccagctagtgagtgtgtgactccgaacttcttacctgccctcactaagcctcagtttcgtcatccgtaataaccacccctgagaggcaggtgccatcagtgctttcattttaacacccaggcgccagctctagcaaagccagaatagagaaggggtttcatcccaggcgattagctcagtggtcttcagtgaggggacatttggcatcatctaaaaacattcttgggggtgctgctgacatctagtgggtagagggtaggggtgctgctaaggacaggccccccacaacagggaattacccagcccaaattgtccccagtgccgaggctgagaaaccctggtttggttcctaatcctccacgctagactgctagctttgttattccaaggtgacttcaccaagcccgggccctgcccgccagaagtgggggacaagtggccaaatgtctatatcagaggcaggctctaagtccccaggacaggtctgaaaaaagtctgcagtgggcagaaagaggtagagatggtggcattcctctggccaagagggagaggtgaaagggctgctgagtgatggctctcgcagccgccgctaggtggtgctgctgcctcagagacgccttatgcttcccggtgaccgcaagttgacaaatgtgggccgactcctgtctccctaaatggtttcccttgttaccagcgcctgtttcactggatgtgaaatgactgcggtttctaaaagctctgaggggaagatccagctcagtggcacaggcccttgactcagactgaaccaggtcccaggcccagttctgccccacactggctccctgcacgtgcctggacagtgaaggctccgagctgctgtttgtgcatctgtcaagaggagagcacagtggctgcagcatagagtggctgggcgtgagcgtgagagcaggtgttcagagcgaggcacagggtctggcagataggacatggccatggtgtcggttttatcctttaaggcaacatcaccctcagtgtccctgccctgggaagcctctcaaagtccagctaggcacggggtgactggattgagatgggggtggggcgatcaaaacttacggcttttagagtgtttctctgaattatgtggcttttaaaaattgtatatatttaatgtgtacaacttgatttaatatatacatatacacaaaaaaatgtgtacattgtgaaataatcacggcaatcaagtgaattaacatatccatcacctcacttttgtgcgtgtgtgtgggtgggggttgtgtgtgcaccttgggtgatgaaaatatgcagtagatctgttagcagatttcaagtctgtaacacagtaggatgacctgtagtcactgtgctgtacatgagagctccggaacttactcatcgtgcgtcgtaccctttgatcagcgtctccccatttccctcctccccagtccctggtaaccaccctttgactctctgcttctatgaatttgactgtcttagattctccctgtaattgagatcatgcagtatgcgtggcttttcttgtcctggcaccgaaaagggtgccctgctgtgggaaacccaggcagatgcccctggctttatagccccttcaccacagtgcttttataagccctgcaaaaagggtagaaatcattgcacgtttacagaacttggatttgtaaggggtgaggaggatagaagacctttgcttttatttttgttttctaatcacagaagaaaaaatgtcctcattgttaaataacgaaaagccaaatgttagaaaaatgtaaagtcaagtttctgcagaattcaaccctaacgatccattgtgcaccagccattctgctgtttgcttttctttttcccaccttcccagtgtatcctagatctcattgtcccgttctgtaaccctgcctggtttggtttaggagtggcagcttgttgtgctataatctatttaacctgaccacgggcatttaggtggtttccagcttttcactattacaagctaccatttcacaaatgcacctgttgcctgttggggttagtgacctaagtgacagagtcccgagagactgagattacgtacaggctcccgggtttattagaaaaggataccacagaaagtcagccacacagtgagggggtagtagaaaaatcccagcctgataatagaggcacctccaactgtcctatggtggccccccaccacccacagagtcatctcttggaggccctggaaaagtccctgctggggagtggagggagcctgtcgctgttccagctccagggtacagctgagagactcacagttgcacatctgaagctcccagtatggtgtctgtgctgctggtggtctggaagccactagccagtcacagcagggctcagtaagacaccccaacagctccttatcctgccagcccattacccctccctacttctcccccagcaagagccagaatgacacagaaagaaaaagaagtgctctgggtatcagaatcacctgggtgacacgatacccatgttagactccaggtggataaataaactgtggactattcagagaatgtactactatatagcaaaaaagaaaagaaaaaggaaaaggaaagaaggaatgaactactaccattgcatacacagcaacctggaaagccctcagatgtggtaataagcgaaagaggccagacataggaagtgtgcgtactgtctgcttccattagataaggttcatggacaggcaaaacgagtctgatgtgctagaagcagaataagggttgcattggggtagcgggtactgactgggcaggggcatgaggaagtcttctggagagctgggaatgtcagatttgggatctggatggtgcttacaccgtgtgtatatgtaaaaattcatcatgctgggcacttagggttatgtatctatgtgttttatacgtagatatacccgaggctgggtactttataagggaaagaggtttcattgacttacagctcagcactgctggggaggcctcaggaaacttacaatcatggcagaaggtgaagcaaacacatccttcttcacatggcaacagcaaggagaagaatgagtgctcagcaaagggggaagccccttacaaaaccatcacatctcgtgagaactcactatcacgagaacaggatgggggaaaccacccccatgattcaattatctccacctgatccctcccacaacacgtggggattatgggaactacaattcaagatgagacttagttggggacatagccaaaccatatcatacatatatgtgtgtgtatatttccacatatgtcaagctgtccacttaggatttgtgatatacataaccccatctttaaaaacattaagattcctaagattctgccttagacccattgactccttgcttggagggatccccaagcactgcctcagtagtgttatgagcaggcgattttgaaaactgctcttctaagactacaaaccgcacagcctgtctgccatgcctgctcagagtgcacagtggcttttctgaatgcagtggctttcccggagaactgacttccaaggaggaccacgccacaggcccacactgtggcttccatcacgatcccgggctcccagattcctctttgtggtgtttttgatgattcccaacagactgttgagtttgactttgatcgacctcagttaggtacctcgacggctccaaataacttaatggtttatttcctcttcacccaagagcaactgttttcagtcctggaatatggtagagattttctttgtttgttttgtttttagagacaggtctcaccctgtcgcctaggctagtctccagtgatacgatcatggctcactgcagccttgaactcctggcctcaagctgggaccacaggtgcacaccatcacacctggctaaagctgagattttgaatctccgaataatagtaataataataagaagaatggcagttaacattatcgagtgcttgcattgcggcccatgctgtccattcacacagccagtgaatcagtgactactactactgtcctgagtgctttctgtgcattttctccattaactcttaccactacttcatgaggaagttttggcttcatgaaactggggcgtggggagggtcagcagtttgcccaaggtcacagcacagctaggaagtggcaggggcgagatgtggacacaagcaggccagtccaagtccacgattaaacccagagcttcccaaacactagcacgcatggggagccctgcacacttctcacatgcagagtgctgggcccacccctggagattctgactccgtggcgcagggccggggcccaagatcctacaggtctgacaagctccggggttgctgtgctccccatctgaggacaagactctgagtagcgaggctccaaaccatgcccccagcaggtgtgaatcgtgttctgcctttagctgtcctgggggccgggcaggtgagctggtgcagcactcacacaacattccaaaggacaggcgatgggacagcagtgcctgccttgcagggtggctggtaagaacacagagggaaatatgcctggcaagggcccaacactgagatatcaaactgcaggccataggctgcagctggctagtagacatgtttttgccggccagcacagctttaaaagctagttgatttcagtggcaaacatgtcaggatcaggagatgcagtgttggaatctggttttgcctctcttcactgttgaaagccctcaccatactggcctgcatttctgcagggccaggcgctgggagctggggaatggggttgctcttcagttgaccccagtgcccttgggccctcatcacccagttttcattgttgggcccccataatgcatgacaaactctgacatcagacctaagtttgaatcccttctctgtgactgtctctgtgcacgggtaagttaacatctccgagatgtttttgctcatctgcaaaatgggaagaatgagcaggatcatgtgatggttaatggtcatgtaaagcactcagcctagtggccggcatgtagtagggattcagcaggaagggacctttatgcaatcatgttgctatataaggaggaaaaaaaccctactgtggccttcagagttgatgatgtgatttgtgatggcagaagggggcagctttttaccctcattcatgggtggtttgtgaaaatgcccacacaccagctaatctccccctactcccagctctttgttgcactttgccatcaatgaaaagaaaatgttggagtgtcttttttttatttggtgtgggagggcggggaagggctgttctctggtgatgcctttgaacttcctggtgactgtacattgaagatgatctctttgctggttaaaagttaagctcttcccagttagtgtgtttaatcccagcaacccagaggcttacctgattcaagtacattaacgtggtcatctgcttgttacctggcttatctttcctccagcatgagttaacctgttttgtttttttctccctctagattatttgctctcaaataactacgtaaattctatcatcgttcataaatttgacttttctgatgaggagattatggcctattatatatcgttcctgaaaacactttcgttaaaactcaacaaccacactgtccatttcttttataatgaggtaagtaattgccagaggggcacgtgtgggtgtaaagccacacgtggctttttttttttttttttacggcagcgccttatatctggatggtcttgtgtctgtttacaaagctcttatatgcttgttatgattttcatggcaacacttttgactttggcatgtttaaaaaatttttttaattaaataagttacctttctattaaaaaaatgtaattctttgtagagacagggtcttactatgtttcccaggttggccttgaacttccggggcacaagcgatcctcctaccttggcctcccaaagtgttaggattacaggcatgagccacagcacctggccagcctttccattgttaatgtaaaattcagtttgttctgagagctttatacttggtagagaggagacatgcccagatgttgtcttggggaagtgttgccctgtgggaaaaacaggaactccagtcagggctggttttgtcacttccctgctgtgtcaccttaaggaagtcccagtccctttctgaacctcagtttcctcatctgagaaatggggataagaatatacatcttgtagggttattaggggttaaattaaatgagatgatgtcttcaaagtgccagtatgtacatagctccctaaaagcatagacgttgctattgttgataagataatgtccctgacattctttgggagaattattaaaatgaacaacttaaataaataaattgctcctgtcctcacacctaaaaggggtttgaacaatagggtcaatgtatcacccacaccaaaaggtccaggcactggtcgtgctggggctggttcatcctgtggttcaacagtatcagcgaggacccaggctttcccatcttgctgctctgctgactatacagctggcatccatcctcaggttcaacccctcatggtcacaggttggctgccactgccaaaatgcctgatgagatcacttcccttcttgtgtccctttttaacttccaaagaaaactttctcagaaggttctcaccagccttcccctcatgtttccctgcatcccactgagtacttcttaggtgtcaggtgctgggataagcacaagaccagaaatgatctcatttaatctggaaaccataaagtagatgttattatccccatgttatagatgtagaaacagaggtttagaaatactgcattgcacaggttagaagtggtagaatgggtaatgaacccaggtctgacattatctggactcattttctttttaattataattttcaaagtagagatgaggtctcgtcacattgcccaggctggtctcaaaactcctgacctcaagcaatcccccctccttggcctcccaaagtgctgggattctgggcatgagccaccactcccagccaatcaatcagtgattactactactaccactactactgctcttttttcttttttcttgttttgagacagggtcttgctctgttgcccagcctggcgtgcagtggcacgatcacatctcactgcagcctccaactcctgggctcaagccaacctcccacctcagcctctcccaagtagctggtactatgggtgtgcaccaccacacggacttggactcttctgtttcttccatggctttgccttcctgtccctttctacatgccccattgggaatgaaccactgacttacggttcacattggcaacatttttttttttttttttgtctttttctgaagtctctgatggaattcagagagttggggtggggccaggcctggcttatgggcttataatttgttttcgttatttcttttgttttagcacaccaatgactttgccctgtacacagaagccatcaagtttttcaaccaccctgaaagcatggttagaattgctgtaagaaccataactttgaatgtctataaaggtaagtgtcctcatgggcttgtgtctcggctgatttctgacttggcagcaagcactcactcccgtgtgtgtgcgtacagttctccgattgtcacgagggagcacattgatgatgagccgtggcagcttctctcatgaaaaacttggaatcccctagcatttagctggccgctcatggaaatccttgccttctccaggcatgtcgaagtcttgctcatgctgctacatagaagtaggatgtcctgagaggcacgtgtgggattcagagtggctatgttttagaatttgagaaagcaaagttgtctttttaatgtgtcatttaaatttttgtgtcttggcttgtgaaatatactttaatacagctaaggggtaatttgacttttaagtaatatataaaagcatgtcacattgtgaacagcagggggcaatgttgtattcccaacaggctgcaaagcccagcactaacaattcctcctttccctcaagatgttcttaatgcccaaaacattgccccagggaaaaagccattcccccactctccgctgcactgacacaaaggctgcctggccacaagtttcctgaactggaattgcccttccaaggcgatgcttggaagttctctgcctaattcctgggttattttccccggagtcaccacagtggagatgggactattttctcagggatgaaagggctttgactttcatgagccaaaatgttattactccctaatgagggtgggggcttctcagggactcactccagcctagcactgggcttacattaaatttaagaacctttctaagagcccaactggacccacccaggggtcgcaaactgaggacctgtgggccatatccagccatcagacatgttttaactggcttagtttttgaaaaaatgtgtagttgccagtatttaaaaattgggagatcttccatgataatctggatttgcaccttgaagatgtagatttggctagtcaaggcccacagtcctgcagttgggggggtcagctggcacagaagcagctgcccctttggggtcaaggcccgtgctcccaggtcacacgctggacctctggcaactagccaacgtggcaggcttgtaagattgtgaccctggtccaagccacagttggttctgctgcctcctgctctgttttctcctgtctccttctaaccttatctctctgtgcagatgcctcccaccctagtctctctccctctgagcagctctctcaccttcccaggtcctaaccctgttaactgttgtctgttttttgcttttccttcaatgacgattcctgtgttccttattccagtgtcatgtaagttattaacctctggttttctgctttcttaatctacccttatatgtaaataccttgcttgagaatggtgtaattctcagtgtagtctagctcagtctgctactgataagtaggctctcccatgcaccattaatgtttagcccaactaatttatttttaagtataaaatatcataagaactgccttgatgactatagttttatgaataagataaacatttttaagtatttccaggaaagacagacaatttcagattatagcagagggctttttcattgtggtttttgggttttgctttgtttttgttttttttttaatcttccccaagttatttttggtagcttgactttttttttcttctgtgaattttctcagtggataaccaggccatgctgcactacatccgagataaaactgctgttccttacttctccaatttggtctggttcattgggagccatgtgatcgaactcgatgactgcgtgcagactgatgaggagtaagtgacacccccagggccactcagtagatagacagggtggttaggggagaattctgttttcatcaaggaaaaataaacacaagaaccgcacttccctacctctgtgtaggcagagcatggacttccgtactgtaaaaggtcctgctcacctatttgtaataatgaaatgctggaaacaactcagacgcctcccagagcaggcggggtaaatcaattcagtacagccatagatggggctgctacgcagctggtgagaaggtcaaggggctctgtcagctgatgaatgcattaacaaaatgtagtctgtctgtacgatggaatagtgtttggcgataaaaaggaatgaagtgctgacacttggtgtggcgtagatgaacctcaaaagcattatgcctagtgaaatgcccagaataggtgaatctataggggcagaaagtagattcgtggtttcctagggctaggatgttgtgtggggacataggaagcaactgctaatgagtatagggcttttttttcttttttgagacagagtattgctctgtcacccaggctggagagcagtggggtgatcatggctcactgcagccttgacctcctaggtttaagcattcctcctgcctcagcctcccaggtagctaagaccaccaggcctgtgccaccatgcccagctaatttttttgatttttagtagagatggggtttcgtcatgttgcccaggccaatcttgcattcctgggctcaagcaatcctcctgtctcggcctcccaaagtgctaggattacaggtatgagccatacatccggccaagtaaggggctgcttgcttttttttttttttttttttttttttttttgagacagagtcttgctctgtctcccaggctggagtgcagtggtgcaatcttggctcactgcacctctgcctcctggattcaagtgattcttctgcctcagcctctggagtagctgggattacaggcatgcaccaccacgcctggctaatttttgtatttttagtagagacagggtttcaccgtgttggctaggctagtcttgaactcctgacctcatgatccacccacctgggcctcccagaagtgctaggattacaggtgtgagccactgtacccagccataaggtgcttttttttgcaggggggataacagtgttctaaaattgactgtgatcatggtcaggcaactatgtgactctaccaaaaaccattacattgtgtactttaaataattgaatgttatggaatgtgaattatacttcaataaatctcttttaaaaaacagattaggatggtggttttgtcctcaaagggatgattagaagttccagagcaggatttctttcccttggctctattgacctcttgaactgggcaccattgttgggggggctgtcctgtgcgttgtaggatttttagcaacatcgccagcctctctacctgctagatgccagtagcacccctccccagtcgtaccaaccaaaaatgtccccagacattgccaaatgtcccctttaaggcaaattcaccctcacttgagaaccactgctccagggtgacagctttgcccaggcctagtgagaggtgcacctagatggggtcaggatgctaaagggaccagggcagacccattggagcaattgggaaagctagaagccttatggatttaaacagtcatggatgcgagacataatgagacacttaactatagaaagaacaaagttatacaagcaaggaaatgaaatcatagtcctctatttggctccacagggaatgttatgacatcaaccccaattactgataactacttgtggggaaggggcagagagaatggaagagttctgtcataacaggaggtcaatagataatacctaaaatggctcaattgcaaaataggagtccatgcagattttctagaaatatgggaggaactatctgcagaaacaagtaactgcctctggacagtgaggagaagtagaggagggctgggtgcggtggctcacacctgtaatcccagcactttgggaggctgaggcgggcagatcacttgaggccaggagttgaagaccagcctggccccatctctactaaaaatacaaaaattagccagacatggtagtgcacccctgtaatcccagctaccagggaggtcaaggcaagagaattgcttgaacctaggaggtggaggttgcagtgagctgagatcgcaccactgcactccagcctgggtgacagagcaagacactgtctcaaagaaaagaaaaaaacagtggaggaggcgagtctgggccaggagctgctctttttcattatcagcttatcaatgctatttgagttttaaacctagctgcatatattactttgatattttttaaaccaaagtattaaaaagtgaggcactttaaatataccattagagaaaatgttccaaagtatcttattaagtgggagaaaagtgcaaaacattgtgcataaatgttctaggtctcaggcgcacggtgggttcatagacattcattatactgttaggctttacaacatgtatttgctgtaaatatttaccaaatatcttttttcttttcttttttgagatggagtcttgctctgtcacccaggctggagtgcaatagtgcaatcttggctcactgcaacccaatctcccagattcaagtgattcttgtgcctcggcctcctgaatagctgggactacaggtgcatgccaccacccctggctaattttttttttaatatttttagtagagacgggtttcaccatgttggccaggctggtctcgaactcctgacctaaagcaatctgcctgccttggcctcccaaagtgctgggattacagacatgagccactgcacccagctgaaatatcttgttgaagtataagaaataattggctgggcatagtggttcatgcctgtaatcctaccactttgggaggccgaggcagaaggatcacttgagtccaggagtttgagaccagcgtgggcaacatggtgagacccctccaccctctatgaaaaatttttaaaaatagttgggcattgtagcaggtgcctgtaatctgagatgctttggaggctgaggtgggaggatcccttgaacctgggaggttgaggctgtaatgagctgtgctcatgccacagcactccagcctaggtaacaaaacaagaccctatctcaaaaaataataataaataaataaaaggaataattatccagaattatgtaaaagaagcagaattgatcttgtttttactttttttttttcaagtatatacagttagacggatagaaatgtgacatctatattttagatgtgactactactaggagaggtaaaaatgtagaaaaaacagacattagggttataagtcccaaaatgttaatagtggatatttgttagtggtgggtttgagactttgaattctatttgcttttatattttaatttgctgttgtcaaaaatgatcatctatcagttgggtaataacaacaatacaaacaaaatgcctagctagcatttgctgcatactccttgggggtggtgaaagcatcctcaccagctgtttctggagtgtgagactgactccacccaagagacattaccccctggccccccatccccagcatgctgttgctaactgctgggagacggagacctccagggcaggggcctgggggaggggtgtcatgtctttgctctatgtctgcatgtcgtcagggccactggggtggccacggctctggaggcctgcttttctctttagaactcctctggagcattttaattacagtggatttattgctccattagtgctgcttatctggggagccaggggatcttgccacagtggctagtagctgtgcttatgcagtggcttgctggaagagtttagcagcattttgctttgtttacctcattctgggagaccccagcagtcccctgaaattgattttagtaaacctgcccattttcccttgtatatctccccagtaggggccaggataagtgtctcttgagactaactcaaatatgtggatgaactcacagtgacctaagtctcaggccattgatgttaggctcaaaggctcctagtgttggcctccaggctgaggtggtcatttctcctggcaggcatcggaatcggggtaaactgagtgatctggtggcagagcacctagaccacctgcactatctcaatgacatcctgatcatcaactgtgagttcctcaacgatgtgctcactgaccacctgctcaacaggctcttcctgcccctctacgtgtactcactggagaaccaggacaaggtgggtccagccccgtggctcccgctggctgaaggccatcagaagtggggaagaacagtccccagtcccctggaatggggctgagcattgcaaatcaggactgaggttttttttttgtttgtttgtttttaaaagacggagttttgctcttttacccaggctggagtgcagtggtgcgatcttggctcactgcaacctccgcctcctgaattcaagtaattctcctgcctcagcctcccgagtagctgggattacaggtgcataccaccacgcctgactaatttttgtactttttggaagagacggcggcatttcaccatgttggtcaggctggtctcaaactcttgacctcaggtgatacacctgcctgggccttccaaagtgctgggattatggccagaactgaggttttgagcccaagggagattcctttcaaagcacactggctttcctttcctttcctttcctcttatttcctgagacagagacagagtgtgtgtgtgtgagaagactataaaagtgaatgagaaaagattaccgacatcaggaggaaacaggaaacatctacaaatgtagggttttggtttctgtgcatccttccctgaagtgttctcctccccagtaacttttcctggtagttgccagaacccactgatttggagaagatacagacagcgacagaacttgcgcagcatggagggaagggatggagcacactcagggaacggtcccagggtggtgactgtccactgttagcaggccccagaggcctgtggggatgacggctggtaacatgcagggcctcaggaccaggaatctgcatgtctcacctatccctcaggtgattctgattctgtgctgctggttctcagggcccccctgtgaggaatgctgcttctggaggggaggcctctgtgcagttcctccggaggtaaaagggcctcagcaggaggcaggacagagccagctggtcaccatgcagaggtgctccaaggggatggagttttcaagattctcactacagatgagtaaataaaagaaagtgtatttttagtagaaacggggtttcaccatgttggccgggctggtctcaaactcctgatctcaggtgatacgcctgcctcggcctcccaaagtgctgggattacaggcatgagccaccgtgcccagccaggactgaggctttgagccggagggagactcctttcaaagcacgctgcttttcctttcctttcctcttatttcctgagagacagagacagagtgtgtgtgtgagaagactataaaggtgaataagcgccttagctttaccagaggcagctctgggaggcagagacaaagtatgagaattggagttttcagacctgcattcaaattctgcctcttccctttcctaactctgtgacctaaagcagttaacctgagcccgtttcttcggctgcaaaatgagggcctaactattcttctctaacagggtgggtgtgaaatggagcatcttgaaattcattataaacgaggggcttttccaaggccagagtgccctaaacctcctcccccatgctttgaaaataacttcccaagaacaggcctcctggaggcctctcctgccggggcgtccagtgccccagctggtacaaatgaacgtgcttggtaacttaaggagcaagttctcgtgggtcagcctctcatccgtgagtaatggtgaaaggtttctcagatggaaaaatagtgtccttgcaaacagtattgagtgggattttgcggagtggacttttgagtagcaccaagaaaggacagccctagggccgtggaggaagtcagtgggacaggacgcctttgttcacacagaaggcttttggctttgtgtattttgtgctgctcgcttgtgtgacctgatctctctctctctctcctgccaccctgcactagggaggagaacggccgaaaattagcctgccggtgtctctttatcttctgtcacaggtatgcttgatcattcaccaatgtccccactacatttggggtcccttggcgtgccactgccttgaagaaaatccccaggccttatcaccccatcttctctgtcccccccatgctggagtaaaataacagcaaaacagaaggggctttctgttttccaggtactaaatagaggtagtgtgtatctttttcatggtaggagatggaaatccaaagagaaatgaaaaataaaccaaacctaacttgtatagttgatttttaccatgaagactgaggtttccaaaacaactgaggagtgcttgaaatgccctggaaatgtgggctgcatcgcttttactcctgcagctttgaatgaagccccacactgcagaacccacagcgtgcatacacacagcaaccttggtgtaacaaacttcctgaaatgagtctattgttaaagggctttatcgcggttctagttcccagattaccgtgtggaaggaatcttgtagcaaccttagctctcagatttgtgtcttgagccaatttatctccctcccctccttcaacaagtgtgtttccttcatgtaattatgtaatatttacaagaagggaaaaactccatggcgacccagttacataactttaaaaatatttttattacaagcagtccagactctcagggcatctcattagactattaagtagtccagcatttacccagaattctgtttccgcttttgcaatggcacaggtatttatttgctttgatgaggaactgtccttctgacttgatccccagctgttttgaatttggggcggggctttgtctttttggcccaagaggagaggttcagaggccacctcctccccggcaggtaggccaatccggacatgtcctgaccatcactcacagcccagagtcctattctggggctatttgctcagagctctgcacgaggccaagtttgtctgaatgccgctctgtacgacggcgctgagcataaaccccagcctctcctggcagcttttttctgctgcctctttccaagtctgccggcatctcctgcttgagattctgagagtccaacaggacccaagcaagccagttctcagccccaggaatcatatggaaagcatcctcaggacccttcagctgttggagcattgcccgggcagggtctcctccagagagcatggccgccaactgcccacagcgggaacgtcagtggagagagttaggacttttctctgagactcctccctcaccggtttgctttgtaaaggaccagtagcccatgcacccaattacttgtttcagtatctcacagaaaacatagcttgtaattcattgttcctcaaacttgagtaatacatcccttttaaagataaacaacctgaagccctgtttccccctgcattttcatttagcttaatgaaaatgtgacctaaatgtgtgaaaaacctaaaatcaggtataaatcctgtgtcctgaaagcccctacttcaatataaaatcattgcatacttgcaaattattttacaagcatagctagaaaaccatgaaaatttttatggatgacgttaatttggtgtgacaggtgatgctgtcctcctaaaaccaaactgctaacagagtgtggtgtaggcagctgggcccagctttttgagtctggcctgcacgtgcttccacgtaccttacagttactcaccctccctcttttttgggttcagagccagggaaatgagcactgtgtgtgtccacaggcaggaattggttgctttgttcaggggggcctttgtaggtgctcactgaatgcttgtggactgaaaagaaggaataaatgatcagttaaggccgcattcattcaaggtacgtaacggatatttgagaatgaatgaccacagtgattggtgttttgtgttgttggtagagtgatgtgtggcagtaattcggccataaggaaggtgagaaaaatcatcattgctaacatttaagggcctgccaagccttggacgtgggttaactcattgaatcatactatgtggtctctgtgatagaaaaggttcccagtatttttttaaaagatgcaattttttatagggaggtgccacatggccattctgcctgtaccttttatctaatttgaattctatgtatttgttagaataatatattccccttgttcaaacagtacaaaacatggcatgtgaaaagtctctctcactctataccctgagcacccaactgcactccccagaggcagcctgtgttgatttttgccttcactttttaaaaaataattttttttaaacaacgttttttaaagttaaaaagttcaaacatgtaaaaaccgggtttctgttctagttttgttcaggctcctgacttctatccccagagacaattagggttacagggttctcgtatgtcctaacagagacatctgtcaggggttcttaactaggggcaattttgcccctcaggggatacctggcagtgtctggggagatgcattcagttgtcatgaccgaggctggggtgctactgacatctagtgggtggaggtcagggatgctgctcaccagcctgcagtgtctgggacagcctccctccatactcagttatagcccaaattgtcagcagtgccaagattgagaaaccctggcctatgcatatgtaaataagcaaatacaaacatgcacacgcttttctatgcaaatggtagataagccacaccctgtgctacaccctcttgcctttacattttaaaacaaaatagcaggcatgtctaggccagctttgcaagacagttttgaataccctgattcttaaagctggtcctctgaacattgggcaacaggtgtgggagcagggccagcttagcccagaggcagccctctgattttgcatcctggcccacctgggtttgcctctgtctcgtgtgattttcagccccgtagttcacatacctcctgacgatgctgtggaatccccgtgtgctaaaacccaccacagggtcagagctccctcccgtgatggaatctctgtgtagccaaccctctgccaagtccttgattggaacaaaactctccggccccttcttcttgtatcactaaagtattgggacagtgccttctagtcttctcataaccaaatttgacactaaaatgcccatggaaaggaaggagtgtgctggtttggctgttctttcccgcattgctccacttcagccggatttggcttcacccagccatgagggacagtctcgcattaatgcacttccttccgaggaagagcagccagccaaataggcaacagtctgaaggagagactgaccttacaagagtggaaccgagtcctgcttcctgtggctcattctttgaattttgcatcgtaggaattgctgcttaatacaggacttaggtagcccagcctggtcgcttctgatccaggaagcaagaggttgaaaataccgcacactttcatgcaaatcccgtttcttttttttccgccaggtcttcttaattatacatcatgcaccgctggtgaactcgttagctgaagtcattctgaatggtgatctgtctgagatgtacgctaagactgaacaggatattcagagaagttctgtaagtcattagcttcgggactgaccttaacaggaaaccattgctcattttgctaatctgtgtgtttctctaaaatcagaaactaacattctgaatatatagcagtgatgatgcataagctggtccgggattcagtgaacctaatcagagtcttgattgcatacccaagagaagctgggatcagggaccacctggatttgattgattgtgtgttcttaaacatggaattgtaccactccgggccttaggttgcatatctgtgagacactgttatcgggacacagtgagaaaatgccttatcagaggaactaatgtctacagaagttgggcgatgaacatccatgaatgactcaggccccaggtgagggcagtagagagtggcgaggggtgtggcaaattggagagtgtatgccaccttggcgagcagctcctgttctaccccaggctgctgctgttctgcaggaatatggatgtaggattactaggttttttcatgtttctagagaagcgggaaaaacgcattgttacgtgtaatctctagttttaaatgatcatcaagctttggactaagtagcatgtttgtggtctgcaggaaggagctttggcgttccatttggtacactgctgagggaaaacacctgatggccagtgttgtgacttctcttgaagcttttccatcttgtcctctgtatatctctgctgtcatctctcagatcctgctcacatgtcctgagctccagctgccttaatcctggtctgacttgcttttcccccagcatgtccagcatttgtgcctttgaacctgcgcctttaccgtacctacagcctggttcctgatgcacctggttccctcttttcaaaggtcttacccactctaagctccttatggcagggatctcacctgtcactgaatcagctgcagtctgggctgcacaaatgctcatctcacttatgcggagcccaggctgcagctgattcagtgacaggtgagatccctgccataaggagcttagagtgggtaagtgagatgagcatagtgcgttttatacaagggctgtttcataaaggtttcctctctgcagccaggtgctcaggcagtggccaggctggtaaaagggccagctcgccctggggtagtagatttgctgccccacctacatgaatgggtggaatgtgaccctgtggatgaaaggccaccactgcatggagtacaattacaagaggcccctgcccttccactggttttggtgtatgatggtctggccaggtcattttgttattcaggggagcattagcgcctctgaaaagcttcccagaaactctgtccttgttagtggtggtggcattagtgaattgattggggccttttcatggcccctgtctggcctatccctttcttgattcattcagcagtgttgatggagctctttctttgggccaagtatcatgctagttctggggatacacaatgtcataaagagtctgtgccgtattcgagctttacagtacagtagagaggtggacatggatcagatatgcaaataactcactgtcttaactcttataagcgctctaaagggaagaagtgtttggtgagaggctttggcctagaggtgacaggggtgatgtgttaaagattttcctagtggtccatctcatgacaacacacggtctggcaaatgtacagctgactcagagtttatggggccctagatatttctctgcaactttcttaaactagcgtttgctaaatgaatgtaagtcacggaaggctgagtcagcagaatcagcagggcctccagttagaggtgcagagtgccctgccagccacctggtctcgggcaggttgtttcactccatttagaaaacaggcagcgcaagccctgctctagagagctgatggagatgggggcaaaatataaagtgcccgctgggcacggtggctcacccctgtaatcccagcactttgggaggccgaggcgggcagatcaccgggtcaggagatcgagaccatcctggctaacacggtgaaaccccgtctctactaaaaatacaaaaaaaattggccgggcatggtggcaggcgcctgcagtctcagctactcgggaggctgaggcaggagaatggcgtgaacccaggaggcggagcttgcagtgagctgagattgcgccactgcactccagcctgggcgacagagcaagactccatctcaaaaaaaaaaaaaaaaatatatatatatatatatagtgcccatcaagtgcctgctgggttgcaaactggccaccagactcatttggtttggtctttgcagtatttaaaagaaaattttctgaattgccaacattaaaatttaggaagaaaagtccagatttttggaatcttctccaacagtcagaagatctggtccccatcaatgcacgtttctacgggaagcttcgcagagcctgcccccatcagatgaggcgtgtttaccgtgaaacctgcccactgctaactgggactacattgatgttaatatgttaatagcaactggagatgtactgggtccctcgggacttttttttttttttagttgcatgatttccaagcctgaggatagctgccgtggcttcatctcagattgtcttactgtaagataccctctgcagtgctgaagctagacttgtcgttctaagagatgaaaccagagattgctgggctctggggtttgcagcattgtttatttatttttatttatttatttattttgagatggagtctctgtcgcccaggctggagtgcagtggcgtgatctcggctcactgcagcctctgcctctgggttcaagcgtcagcctcccaagtagctgggattacaggcatgtgccaccacgcccagctaatttttgtatttttagtagaaatgggctttcaccatgttggccaggctgctcttgaactcctgagctcaactgatctgcctgccttggcctcccaaagtgttgggattacaagtgtgagacactgcacctggcctgcagaattttttttttttttttttttttttttttttttttttgagactgagtctcgctctgtcgcccaggctggagtacagcggcacgatctcagctcactgcaagctctgcctcccgggttcacgccattctcctgcctcagcctcccaagtagctgggactacaggcgcctgcccccacacccggctcattttttgtatttttagtagagacggggtttcactatgttagccaggatggtctcaatctcctgacctcgtgatccacccgcctcagcctcccaaagtgctgagattacaggcatgagccggcctgctgcatttttagagttgtgataagaacacaacatgagatctacccttttaacacatttttatttgtatggttaacattattgttgagtgtaggcacagcatcattcagcagatttctagatctcatttatcttgcatactgaaacttcagaagtacaatgtgctatccattgctctgtggagtcacctgcatgactgatacttcatacccactggacaacaactctccatccccccagccccagcaatcaccattctcctctctgcatgagtttgacaattttagatacctcgtataagtagaatcgtgcagcatttgtctttgtcactggctcatttcacttaatgtaatgtcctcgagattcatccatgttgtcgcatatatcagaatttatttctttaaggctcaatgtgtgtgtgtgtgtgtgtgtgtgtgtgtgtaccaagaaatataccacattttctttttctttctttatccatttatccatcattatgcagttttagtttttttgattttttttttggtgtgttttgttttgttttgtttttgacagagtctggctctgtcgcccaggctggagtacagtagcgtgatctcggctcactgcaacctctgtctccagggttcaagtgattctcgtgcctcagcctccgaatagctgggactacaggcatgcaccaccacacccagctaattttgtttgtatttttagtagagatgggattttaccatgttggccaggctggtcttgaacttctggcctcaagtgatctgcccgtcttagcctcccaatgtgctgggattacaggtgtgagccactgcacccagcttttatgcagttttttttttaattgaaattttttactgagataattatagatttgcgtgcagttgtaacagataatacagagagatcttcctcagtttcccccagtggtaacatcttgcaaaactctagtacaccctcacaagcaggatattgacagtgatacataggatttatgtttgagcaaaagcaaactgcgggttactggcaacctctcagtttaggacactggctgtagctcaaccatttagtcaggggaagtgtttaggagatctgtcctctctcctgatatggcctcttcttaggatgaaggtctcacctcccttgtgagagacacacaaactgcctttgggatgtaagagccagttgtggtggacacctgaactgaaaatgagactctgtagcgtggagggaattgctagcccacatgtgtcggctttctgcttccagttactacctttctctcagtgtgaagttgaagttggttgtaatctgatgactatcgttcaggtttgggaagagcacaggctgaattccttctgtgacttgtttgataatagtcctggtacgatttaccttccttccctatgagcgagaacagactcctattgtttcctgcccaactcggatgtggtttgattatacttgttttaagtttcttggtcttttttaacctactttctccttcccgtaatttgtagataagttactggtattgcctcatttttaccagcagacctttcacaaaaccaaaccaaaattgaagagagagaagcagaggggagatcacagttatttgaaaggactgtaatttagggttaaatggaaaacacatcagcatggttagatgaatgtctaattgaaattcatctgtgcgttaaaatcatatggttcctgctaaaggctaattcttgctataattcgaatgcagagcagatagtgtttcttgtgtggggaaatcgagtaggacaacactaattctgaaactgctaacatctcgttgtttttgcagaatgaacatatagattagaatttgggatatgcatcattacttgtaggtactttttttaaaggacttttttttcctcttgggtttctgtggaatggtttccttcatttttgcattcattcatttattcatctattcatccattccttcagcagccatctgttgtgtacttgtgctgagagatgagggatgtggtggtgcactggaacgacctgacccctgccctccctgggcttccctcctcccatgaggacagggaccatgtctcggagatgcctgtgccacctgtgccatcatggggcttgccagagatgcccagggaggtgttcggtgcaggagtgaatgactcagtgggtgaagtggtagcagagtcacaagggctctcgtgacattcttgtaatgactctcagagcagaagtcacttcctagcctgccccttgaatgccgccttctctttgcctcagtggctgggtttgcagtgggctgcttttggtgctgttccatgttccacctccagaggcagccttgtggagtgggtgctgtaaccagtttccctgggctcctcaaatcgtggtccctgattttactaggtgttcccgggcctcagtttcttacctctccagtgagaatagcaaacatgggtttatgatgagaattaagtgccgtgtaaagtgcttactccaaagcctttttatgtacacagcaagtgcataaatattagatgttatcattataatgaccttagttcctaaggctgcgcagtgaccttccacctcctacctgggaccttcttccctgggcttacgagctgtctctggactgatgaatgtggaaacagacaccatgcgcccttcagtggggtggcttttgagcagacaccaaggcacagagggagaagtgttagtaataacagtgatgatgaaacaccaatgttagccattgccattgagtgatggtaggtgaagccctctgtgtgtatactgtgtgtatactgtgctctccattcagccagacccagatttaatttctggaaagtgcaaatactgttgtcgttgttttttgttttttgtttttttttgagacaggatctcgcgttgttgcccagtctggagagcagtggtgtgatcctagctcactgcagcctcagcctccccaggtcaaacgatcctcccacctcagcctcctgagtagctgggactaaaggcacatgccaccatgcccagataacttttgtttttttttgtttttttgttttgtggagatggggtttcgccgtgttacccaagctggtctcgaactcctgggctcaaacaattcacccaccttggcctcgcaaagtgctgggattacaggcatgagccatcacacccagctggaaagtataaatacttaactgctaatgtgggttcatatggttggctggttgtgaagtcagggtctgaggattctggggcagaataggcttgcttatctccacataaggacattgacagtctgtctgtagataccagtttagcagttaggatggtttccagatgaatctctggacacctgtcacttctagtagcaggactctctgcccagccggatactcccccaggatatggtgtgtggagccagtggctaggaaagtagcagccttgcttctctgggttgtgtgtttgcagattcagagcattaatcgttgacttagctcccctggtcgctgctgcagggctttctttacaactcaaacttgtatccgatgtcagccgagtctcccgtgtgctgaatgcatcaggcaggatagcaccccttccggccaggattagagttcctgagtcttttagtgaccctgactgtactcatgatcccccagctaatcagtgctggttccaaggcgcgcacattcttcttcctgaaaatgctaataggcttctgggagaaggttgattgtgaatatcaaagggtaaagatagacttctataaattaagggccttaattgacccattgcagacattcccacaagggaattagagcttggtgtatattctcccttttggctttgccattgaggtctatcccctaatccctcactgcagttacggctctgaggtgccattcttgcccaccgaagtattgaatgtggcagctctggtctatgtttaagaggatttgatataatcaaaatccagagtgcaacatgaggtccggtactaaggagcgtatcgttgtctgagaaacagttgcgtctctctgtttcctggggcagaaggtgggctggacaactgaggagggtctcaatgtcccttagtacttgagaagggagcaggctttagccagggccgcgggtgactgtgaccaaaggcccggggttttggccttgggccagctagccagagaaggggcaggtgccttcattgctacatcctggagaagccaattggtaacaatggagtgggcacagtgggcagggatgggagcaggaggcagatggggaagaagccttgtgacttagaccctagctggcttttctatatctgtcctgcagtgtgtgacacagaatgggcttggggcagccacaaggctggaggcagctccatgtagaatggggaccttttctgattgcgttgggccattggtgacttcttctgggtttcaattaaaatcagaaaattgagggtgaggacagacaaatgaggtacatgccacttctggcctctgtcccctgtggcattgttagttttcatgagtgggccagcctcttcggatatttgtgatttttaacctgattttgagttacctgaagccaggtcagtattatttattcagatattcagcagataattattgggtatctgccgtatgccaggcactgttctaggccctggagatatatacccagtgagcaaaacaaaaaccttgacctccaggaacttgggtctcatgcagagagacagaggaacaataaagcaaatagtaacatcagggcacgttagatgtgagaagccctgggaaaacagtagtgaagcagaggatggacatgggcaatgctcggaggctggagtgttacagttctcagtaaggtggctggggttggccttgttgggaaggtgaggtggaagcacagactcaaaggaagcaagagagtgagtcatgttggtatctggaggaagagcattttggtcataaagaacatcgtgaacctgggaggcggagcttgcagtgagccgagatcatgccactacactccagcctgggcgacagagcaagactccgtctcaaaaaaaaaaaaaaaaaaaaaaaagaacagccagtgcaaaggccctgcggtgggatggtgcctagtgtgttggaggaacagcaaagggcaatgtggcaaggggatgggaagtaggagatgaggttggagagaacaagtgtccaagggacatggcacctatgtgccattggaggactcaggagttgctgtggaaggagactggaacctcttcgtctttgtgtccccatgtctagcatggttcctgcagtcaacgttgattgtcttgatgtgacaagtctcggtacgggaatcaaacacatatctctaatgagcggtggacatccggtcttggccagtgtcagagtccttgaaactggttttgctgcgggatgctttgcctgatgggagcctgagggctgcacttgagcaagaagggagcattttgctcacttctcagagacccctgccctttctgggcattccagcagagttcacaagagtggcttggtggtgtgagtcattcgtttcatgcctgagggcagtgcagctctcatccctggaggtgattaatgagtgggagtttccctagagagttctgaggccagttgagtagcagatcctggctggcctgaaattgattgcctgctgaccacttgctgggttgcttataacctggccccaggacagcttcctggtagcctccagatacgcacggggacaaatttgttagtttcatgggcaaagagaagaaaaaatacaataccttactgttaaccacagtcacccttctgtgcaatagaacaccagatctcactcctcctgtctaattggaactttgtacctgttgaccaccctctccccatcttccccatccgcatccctgcatcccctccctgcccagtctcctgtaaccactgttctcctctctacttctatgagatcaactttgtttagattccacaagtgagatcatgctggaagacagagttttgaatgttctcaccacaaagaaatgataaatacatgaggcgatggatatgctaagtaccctgatgtgatcattacatgacgtacacatatattaaaacatcaaattgtaccccataaccatgtacaattataatgcatccattaaaaaataaaaaagaaaaagataacattaaatggttttattcactcaaataatattgtgctgggtgacacttgagttctgggtgggtcattttctgacatgagcagaatgtgctccatctgtgaggcagaggctggctgccatacttacccttgtgcactccctgcctcgagtaattgttgagcccctacaagttgcaggcaggtgctgtgaatgaacaagacatctgtcccttccctgatgatctatttgtgggggatagacagtaagccagctcatcctcacaaatttaagatttggatatgggaaggaaatagaagcaactttgggaggtatgatgagggaagccctctaaggagggagcctaatattgagaactgaggtcagggagctaggcctgctgagagttgaggggttgggtcggggggcgtggccaaaacatgagaaatggtgagtcagaggcctctgtgggaaggagttgggtgtatatgggatcaggagagaggccagcattcaagaaatatcctgggttggtggaagagagggacggttttcgttttatagaagatgaacctggctgggcttggtggttcatgcctgtaatcccaccactttgggaggccggtgtgggcagatcacttgaggccagcctagacaacatggtaagaccctgtctcttcaaaaaaatacaaaaattaaccgggcgtgatgatgcgtacctgtgattccagctactcaggaggctgaggtgggaccatctcttgagcctgggaggcggaggttgcagtgagccatgatcacaccactgcactccagcctgggcaatagagtgagactgtctaaaaaagaaagaaaagaagtcaagcttacttgtttgtctcattgaacatctcatttcacgctcataatgaaagagagcgaggtggtgttattgtcacacgctccccataaggaagccaaggttccgtgattgttcctttgggattgcaggtgactagccccaaatctcacactgtttctattccaagtctttttatcaccacttgcaattatgttttccagtttggcatgagatgtcagggcagtgtagcattttgggctgttctgagtaacagaataaccagtgtttcacagttcatctttttcaaaatatagtaaaatactctttccaaagaaataccaaataagtgcttggtttgtcattgtttagtaagggagtgtgagatgcctcattttgtgtgattgaagaggcctgttcaatgctcgtgatgatcttgcaattaattcatcccacaagcattccctcttgattgaatgccagagacagtgccagacatgctgcttggcattgagagggacagagaaggtgacctgggatggggaaggcaagggagaggaggctggccccctacagacttagtgacacgccagaggtcactttccaagaggaaattgcagcaccatcttgacgttacctgctcctcatctcagcgtcaagtgctgagcacgcggctgcaagaggcctgtgagtgctgtgagtctgttccaattcctgagagatggacatttccttgctttacgcctctgcagctgcaacacttgataactggtaattcatggagaagaatgccgtgttctccttgttaatggaagcggcctgctacctttgcatgttccccactccatagcattcattttctcctttacatttcggcagtgccgtcaaatcgcctcactgatgttgcagctgtgcattcttcatgcatgttgggctttggttccacagctccacgcggctcctggattggcgagtaaggcatatgtctatacatcaccctggggtacatcacccatctggtgcttgcttgccaatcacctccttctggatgagaacaggttcactctgctgcactcatcacccggcttcctttttcagccagtggccaagccatgtgctacagtgctgttggttacagtgggtgtgacctcctgtgactttttgtctctgtgtttatcaggtaaaaatgtgaaaagatgtgtgtgtctgtggtcccagctacatgggaggctgaggctggagtatcacttgaacccaggagacggaggttgcagtgagctaagatcacaccactgcactccagcctgggtgacaaagtaagatcctgtctcaaaaaaaaaagtgaaaagagtcacattatagacaaccatataattgtcaggctagaggaccacctgttgagtgatgcataaactgtcactgcatttttgttgcaaagagctactgtttctctgattagtgtgacgtcggcatggcctagtctttacatcagtgctcccgggaggctggcccaacgttgggaggtgcagcaaatgcatatggaagggaatcgtgtttgagccatgtggcaggaaggttgtgcacctgggcactggggctagtttattcctgggttcaaatcctgcctctgcctctcactagtgggtgaccttgggcaagatcctcacctgtgtagttccttgccccatttggttatttgtaggataaagcaagacaatgtatataaagtgttcagagccatgctgggcacattttaagtgttcactgagtattcaggatggctgttattacctggaaagagtaacaagagtgtgccatctcttggcacctctcagcagcactgttggggagatgctaatatgatgcccattgatggctgtggcaactgagacctatagaggagaaggtaggaagcagtggagccaggactgaaaccacggtggatgggaccctgggcctctgaatcccaccctggctttgtaccttgctgtgtaccttgccagtcctggcgcctgaggccggagatggggaaggttagccaggggcccaggagcatgttggggaggctgagtctagcccactaacaaagcagaaggccagcgagcagtaagttgctgggagcttgggagtcaagtttaaagcatagaacatgactgttctttaaaagcccctcccctgccctctcttccatcctcgtgatctatttgccagggggttgaagggcaatgaaaatttctctggtgcccccttgtaccaggcattttgcctgttggatcccacactacccccatggtggcgtgtgatatggaactactcttgtctctgttttacagatgaggaactgaggctcctgtggtcagggtcgcttggctagtagaatgtgggtctcagacttggggccaggtctgcctgggcatgttttttgttagtcaccatggcctgtctcctttcttaaggggaaaacctttctcctacttctcaaatcgcttagcagagctgtttgaggaagcatcctcagagggtgagtaggctcggcctaggagagcctggaagggtcttcttagcttgattatcacaacagctttgatagattcagacagaatctcaggccctggaatctctccttcctttacctgatgcctctggccaccggtctctctttccttcgtgctcaaccaagattcttccctgggcaggctgcctggtgcccttacatcccctttcctggtcactcgccaacaactgctttctcccctccctgctgccccactgaatagatgctgagaaacccactcaacacgttgcatctatagggcattgagtcaaggtatctgatatctcttctgaggctgtgagcctgaagaacccctttgtgagcagcacgggctagtgcctgactgagaggctactggctggccggggaccactgccctgacttcctgcaaagtccagcggctgtgcatctgcccctacctggggagctggccgagcaccttgggtccaagggtaccaccactgtcaccaagcaccagccccaggtgacctaggccttagcagaagtaaaaggtgagtggcttctgggcacacctagagagctggctcctcctgggctctgagctggctttcctactattctttccttcctgagcatgctgctgaagtcctgttgacatccaagacttgtatcagtcatttcctcctctatcaagccgtcctaagctccccctatgcctcccagccctggcgcattttccctcccttcctctgcggccccatcactcttgtgtgaacctcttctcttccagcgtctgcatgggccatgtggcaataaatgcaggattcaccaggattcacctgtctggggtggactgtgggctctgagaggggtggactgtgggctctgagaggcgtggactgtgggctctgagaggcgtggcctgtggcttcctgcgcttacctgagtccccctcatttcatcagtgatcagtgaatccagctctcccacctgttcgctttgtcctaccttgtatttagggcattacagcaatccaacttcattgaaaatcctcttggtaaactttttggtgttttttgtttgtttgtttttgagacacggtcttgctgtgtcacccaggctggagtgcagtggcacgaccacagctcactgcagcctcaaccttctgggctcaagtgatcttcctgcctcagcctcccaagtagctgggactgcaggcatgcaccaccatacccagctaaattttgtattttttgtagagacaaggtctcaccatgcttcctgtgctcatcttgaacttctgggctcaagtgatcctcctgccttagcctccccagatcttgggattacaggcatgagccactgcgcccagcctgggaaagtttttaaattgaggaatcacataaatacaataaagtacataaaagtttagtaatcttagatgtactgcttgatgattttgtgcacatgattatattcatgtataattcgagtcaagatggaaaacatttctggtattcccataaagcccctcctcagtttgtaacccatacctccaccccacccaagagaatcaccatcctaacttataaacttgccttttcaaagttttttaaattgtgataaaataaacataaaattcactctcttaactattcttaagtgttcagttcagtggcattaatgcgttttgtaaagatgttctttacgtgtaaatagtgctggtaataaaagtttctagtgctggtaatatctaaatagtgctggtaataaaacaattgagtgatgtagacgcaggtagagcagaaagtgaaaggtcctccaacctcagtatcttcctcagagggaaccactgttctcagtttgtatattcttccagacctttcgctgtgtattttcatgtaagtatcaacccaggaatacatgatatgcacttatgtttcagccctatagttttggttttattttaaccataaactgaatcattaattgttgattgattgcaacttgctttttcttgtgcagcctgtgtccaggtctttgtaagctgctgtacccacacctggtggaacatgtttgtttgacatctgtcttctcagccatgtgtctcctctcgttcactcaggcacccagtctttggttgtttccatcctccctcccatcccattgctgccctttgcagtttctgcacacagattcctccattccatgaaagattgatccctggggattcacctttcccaaagtgtttgacttttgaaaaagcaaggaccaaagcctcaggtgaaggggttcaaggctgatggaagacgtcattaaccagcaggcaggtgcagacgcttagggagtagttaggccccggggcacctctaaaatgtagttgctgactgttagctggccctcaccccagaagccagcccaaatattcagctgcagagctcagggctcccttgtgtttcactgcagtcagcaaagaggctccttcccttcatgctcctcctgtagcccagcctcaggcacctgggagatgagcgcgtggtgaaacctaaacctgtggcatttgggacatgtagaccttctttgcagaatacttttccctggggcatgtgttgtgtactttctttatgagaaaatcaacccaaacgccttgtgatttcttactctgaagtgggcttttccacttctggttagtttgggtgagcttgctctttcattctgctacgtttagctcctgagaaagtttggctttttttccccttctttccctcccttctccttcttctccttttttcatcattctgtcttgccctttgggtacagcctggtacaaacattcattcctacagccatgagctcactcagcagcagcctgtccgcccctgctctggtccaggcaccgtggggtagagatgagagcacagtggcgagaggagggacaggggcccttctcctaggggcttcagactggagcatccttggaggctggcagccagaagcagggtgaccggagcaacagaaatggtcacaaatctctgcccacatttcccagccaaattctaccagcctctgcatgctaactgtgatgttttggtgttagctttaagaaaaaacaaaaaacaaaaaacaggtttttaaaatatagaataaaagggagcaaaaatagtccttagtcccaatgtccaaatgacccctgctgaatttgtattatgtatctatttatatgtatatgtttagagacagggtctcactgtgtggccccggctggtcttgaactactgggctcaaggaatcctcccatctcagcctcccaaagtgctgggattacagacatgagctccacacccagctgaatgtttaaaataaagttaatatatgttcatgattagaaatctcaaaccaaaaggtataaaataaaaaaagtgtgcttgtgtgggtgtgtacacagtgccactgctttttttaattcccccaagatgccaatacattcttaggcatctttccaggaaaagtcgcatttacaccatcacgtatagcctttgaaaagctttacttgaaagggaccctactgcctactcccttcctgcattttcatcctggtgctgagtctgcatcagtttatttaggaataaaaaggccccagtcttcttagattcccaccctttggacaaacagatcataattacctaacaactcccctatcaatggacatttaggttatttccagttgtttactggaaggtcgtgttataaaggtttgaaatttccccagtaagcatgccctcccacaccagacacctgatcactgagaaaagtagatccctttggaaagttttaaaattcattcttgcagctgattttttttttctttttttagatgtaagcaggaaaagaaggtaatgttttgtgttggatgttcaccgtttcggcactctctgaaggaactttattacttatttatttattttgagacggagtctcactctgttgtgcccaggctggagtgcggtggtttaatcttggtttacttcaacctccgcctcccaggttcgatcgattctcttgcctcagcctcccgagtagttgggactacaagcgcccgccaccacacctggctaattttttgtatttttagtagaagcggagtttcactatattggccaggctgctcttgaatacctgacctcaggtgatccacctgcctgggcctcccaaagtgctgggattacaggcgtgagccaccacgcccggcctctgaatgaactttatatccatgggttcctttggttctagggggccagaattactctccatgttttagaacaggaacctgaggcctaggacaggccagctgggttgggtttcagaccactctggccagccccaggcgctgagcactttatttcacttcgtcagttctgccagtttgttctgtatgtctgagtccacacagagcttagggaggggttctatatctgtctgtgtgaatttctgctcttaatttcaaactaggggacgttttgccctgcgcttggtctctattttctgtttctgaaagctttgattgctgtgtggccggctctgaaattcactaggagttggcagtgatgggaggaagctaacttcctgggtttggatgcttcaggagaagatgagagggcgactaggctgcattcgatcacccggcatcctaagtgggctctgatggatgctgtctgtcaagcagtgcattctcagaacgctcccatctgggggccctcggttattggcgtctgtaatacgctatctgggtttcctggacagtagaatcatgcagcaatttatgtgtcatttttttgtggttgaataatccacagtgggcaaataaaaattaatgtttatatttggatgctaattcacctttcaattaggttttgttttgagcgttattgaaattaatctgtgttccttgagcacatttccatttattggcaaggtacggtgttccccagcatataattggtggtcgtttggggtaaattcagatggataatctatatcaagataatggaaaagtttattttgaaactttttttaaattacaaaatgatatctgaacattatttcagactctgataagagaaaaacacttcaatcaaaatcccgccctaaacaaatcaattttcttctgtcttttgtgcctttctagtctgtttgcatgtctatacccttttttttttattttcttttttgagacatctcactctgtctcctgggctagagtgcagtggcgccatgttggcgctctgcctcctgggctcgagcgatccttctacctcagcctctgaagtagctgggactacatgggcatgccaccatgcccagctaatttttctattttttgtagagatggggttttgccatgttgcccaggctggtcttcaaatccttggctcaagtgatcctcccagcttggtctcccaaattgctgggattacaggtgtgagccatgtgcctggccttcctctttaaagagcattaaatgtagaattaagttttagctcctggtgaaacactgttcttttaggaagagtgtgagctttggaattggcaagccccagtaagccccaattcaaattctgactccaactcagtagctgtgtgacattgggcaagttatttaacctttctgctcctctattttctcaatgataaaaatgggactgataattcctatatattatggttgttataaagactgagatatactaatatgaagcatgaaccacagttgacactagcctcattctgtcgcccaggctggatggagtgtagtggcacgatctcgctcactgaagccttgacctcccagcctcaagcaatccctcccacctcagccccgcaaagtgctgggattagagaggtgagccaccacacccggccatctctgactttttaaaggaagaactttgtcctctggggcgagctgatctttgacttattgctgatacttactaggctccctttctaatgagagccagaatttgacaacacccactacacctggctttttctttctggttatttatgtttaatataatagcaaggcacgctagtgttccattgcctgtagtgatagttttgtttaaaatgaacttatttgggttaaaattaataataatatcagtgggctgtagctaagacacagcttgtgtggctggtacgtggttttgaatcccggctctgccacctcctggctgtgtgacctcgggcagatccttttctgtctctgtgcttcagtttcttcacctgtaaaatgaggatgacacagtaatatctcatgcagttgctataaagttcaagtgagatcatatagtcagagcctgagaacagcatctgacacataagaaagtaccacagaagtgttcatcagaagttctccttacacaaacagctaatatttggggagtgtagagctgctgctggtaaagtgcaccatttctgacttagggcagtagacagtaaatggtagctggcactgttgttttgattatttgatgatgatgttaataatgggcataataatagatctggaggtggcatttgttttggagattaatttctctttattaaaatatgtttttattgtctgtgttcatggggtaaaatggcagtgttgccacattgatgtattgcattgtggtgaagtcaggaccttcattgcatccatcactggagtaatgcgcactggacccaccaaacaccctcccatcatccaccccctccaagtccaccacccctcccagtctcattgtccatcatcccacactctgctgccatgtgcacatgttatttagctcctgcttatgagaatatgcagtaagtgtctgagttatttcacttaagataatcgtccccatgttgctgcaaaatacatgatttccttcttttttagtgctgaatactatgccatcgtgtgtatacatgtcatcttctttatctagtcctctgttggtggacacttaggccgattccatgtctttgctattgtgaatagtcccgcagtaagcatgcgagtgcagctatcttatgatataatggtttcttttggagatgagtttcttaggacagaaacttttgggcaacttgatagcatccagcaggattctagtgttcaaattcacctgttgccttcgttggactttcctaggccaagcccagcattcggtgcttcattaaacccaccgagacactcgagcggtcccttgagatgaacaagcacaagggcaagaggcgggtgcaaaagagacccaactacaaaaacgttggggaagaagaagatgaggagaaagggcccaccgaggatgcccaagaagacgccgagaaggctaaaggtacagagggtggttcaaaaggcatcaagacgagtggggagagtgaaggtgagtgtccccatgaacgccgccctgtgcctgcgccgccagccagcccgccagcgaggctgccacctgtgccctctccacccagacttctgctccccacagtgtccagccagtgattcgattcctacctcacactggcgtacctcattctatacagccctgccactcggaggctgctgtaggtgtatgtcatatgcaggtccagggcaagtcccgccctcatgggatgggtgacctggggccagttttcctcacctattaaaggagggtaacaaatagtacctactttgtagtgttcatacaagaattaaatgagcgaatatgtgcaatgtgctccaaacagtgcctggcccattctaaatgctgcaaaggcttcgatgctgcagaagtgttcgtcattattatgacagtaggagcagcatggaattattattatctttatccttattactgatataattattcccaataacctggggttatgatttgcatcctgtgcactgcgggaagaaagaggatttgtgtttaatgaaatgatatgcttgtaggccgagtgcagtggctcacaccttaatcccagcactttgggaagccaaggtgggaggatcacttgagcccaggagcttgagaccagcctcaccaacatgacgagatcctgtctctacaaaaaaaaaaaaaaaaaaagtgtttagtatttttaaaatactgaaaaatcaaatataattctctcaattcttacgttaaggttttttaagtcctgtctgtttagaatgaggtgcactcgtgtgtagtacgtatgtgctctgtaagcaaaatcattcattcctccttttgccctttttgggaattctggtcaatttttcacctccctctcgttgagatgctaaaaccttcttgaattggagatcatttactcttgggattaagcagaatggaactgccctattgcttgtgtcatgggccaggctcacagccacacagctggggtctctgcccgtcgtcctgggcactggggctgggggcagcgggaagtgatggggagcttgatacttggtagaagtggagctggggctcttctcaggaaggtctggccacactttctggaatgaacttggcatctcctcagcagtctggttgcagtctctgtgggtgtggggaacacttcctgtgagccctcctcctgggccttgggctcacagtggctgctctgaaaccacctctccacagccctgtcagcaaggactgcgtgagcttcccagtccagggcatctgaagctgtaacacagagccactcgttcagtgactgggagctcatttgcttttgggagttgcctgagattctgcagccaaagaatgcctccgccaccaccttgcttgctccatcatgactttcttggcagttgtcagtgaataccatgatcacatttcaacaagcgtaaccaaaatgtctctctggtgccaccgagacctctttttatggttgagatctccagcctcctcttatttctgtttaaagtgtgcaataggtgttttggtttaggaattcatttttggcctgggaagcctttgccaataaatatcactgtggtggggaggggaaggccaaacccaaggtaagccatgctaatttgcttattggggtcattctgattattttgttgttaatgctgaagaaaaatgtctgcctaatccctaggtttagttgttctgttgccacactgggggagaaatggacatcttcacctcattttgtgcattgtgttctcatcgattttgttttggaaagatgctacctctttcattccagtccttttaaggatgctctctaaccaggcctcagctgtgactaacagtggtgtggatcagacaggcttagccccaaaatcacaatcaaattagtcagccagccagcccagtcctggcacacaggggcttcaggccagttctgcaggctgctgtttcagcttgaactgcttgaattagagtaggggctcctggaagctgtgcccagctgccctgggcagggtacaagggaacgaatttctgccacgtccaaaagcctgttttccaggtggttacttagccagatcgtgccacacaggacccaggaatctccccagaggctttgcttgaacagttggtgcttcagggctcagtcacacatggctctcaatgacctgtgcaattttgatgccctcctaatttcttgagcacattagtcatttcaaaatatgatggatctgtcattttgtcactcagctcaccataaatacatacaactttcatagaccggtcctgccaggcaacagcacttgtattctggagctttctgaattatatatttgctctcttgattatttgtaaatgtgaaggtgcagttggtgggtgttctctccttagacggtatctgtgtttggatgaaactgcacagctgttaattcctgtgagtcggaagggtgtcaggcacatttcttcattcacattgcataccagagaacagtgtagatgctgggcagtgcctagaagatgcgagatctgactcgcagtcatgtctcagcatctaggtttattgtgtgtcttggatggcctcttgaagctctggacctcattgttcctgtctggaaatttctgaatatagaaaatataattcacatgatgactttttttttttttaagtgaagatacgttgatatttgcgattgcaagatttagaaatccaactcagactggcttaagcaaagagggtgtttattgttcatgttcctgggaagcttggacagggctgggcccaggtgcgctcacatcgtcccagcttggccagcaagtggagagggggcttctccttcccagtggctgccactgaagtcctggggccaatgcttgtgggtactgtgggcctgacttgggtcctcttcccacccccagagatattctggaccgattggcctggcccgcatgacaaatctatgctacagtggctccctcagtaaaaaatgagatgcgtttatcagaagcaaggggcagggatgctgggccagcagaaatagcagatttccccctagaaagtcacactgtatttctgggtactccccttctctctcaaggccatcttctgccatcctattttgagatagacatgcggctcttttctcttccacattatttcttctctagaagctcctttcattgtccctagatccacggacttatcgacagatggacatggtgactcttaaggaaagagatgctgacactctgcctctgcataccctgccaatcccattttagtagtgaaattttgactttaaaagacggggaaaatacaggagtaaaaaaggcatgtggtcacgaggcacagttttgccatgacccaatttggatatggcattagtgtgtattgttttgttgttgttgttgttattttttataaatgcagcacccagaattcacacctcctccagatttaagctcagacaaggaagttgtgtgaaatgaatgtgcacccctaacccatccactcccttccccagtctacagaggaatttgctctgcctcaggtcccaagtaatgggtgactcattctgcaaccaagaaatcacagggcccctaaatttgcagaaattaaatactaaaaaaagaaggatatcatcgtccctgtaggcaaagaagcattcactctgcccaggaaggcagacttcctagggtacgtgcttgttttttagcttgcccttgagtctgaaaggacagttatctcttttggaatttacttagagcagtaacttaataagcatatcctagggactgaatccttcaaactcctcatgtaaaaatagggctggactactgtttttttgcctatggaaaaagtaattgcccggactcaccttcaaagcctactcatttgttgaaattccagcaagggcatgaagtaaagatgataggcctttgaacctgccaggttagctgggtttgagagggtacctgggagtttagagacccatcttgcctttttctttttcttttggaagtctctactgaaatgggatgaaacctggcctcatttccagctcctctttcaaaattagagccagccccaggcctggcagtgtcttggttggggcaagccagggactgactatcggagagttgagatctgaatcccagctctgcccctgaacagctgtgtggctctgggcaagtaattgccctctctgcacttctccacctatagaggggacttcctaatgcctgggcctcagattgtcataagtgagaacatcaacactgtagcgttcagcatgtgacacaggagctttctacgaaccctggccaaggtggagggcagagtgaggcgctcgaacagcaatttgagtgtggttgcatgacctccacttgggcaccaagcacgtttctgtgggacccgtttctctgttaatttctacagctagtaagtgagcttagtgagtgtgcaggtgagtatgtgtgtgagagtgagtgtgtttgtatgtatgtgtgtgtgtaatggtgggaagagagggagaagaaggatcagcaggcccaggcgctgcagtagagagatgttgtggggctgtcaggttttcagatgggcttaactgggataaggaggagaattagaggtgaattaggacaaagcctctgaagagcaacttcccgaaaacagttctcaactcaatctcctgctgggcagtagaagataataaaaaaacaaaggaagggctgcccccagtacttagagcacttagcgcacacactctcggtcgttgtcaggggctgtttgcttcttgaaattctgctaaaaagccagccaattacatgcaggctgtcccttatatcctaggtaaccagccaggcatctttccccttagccttcctttgaaggtcttattcccctcttgccatcttttttcagtctgtccttgctgtgatcgctggaatatggaacacagagggcaactgagaaaatccttgaatttgtgaagtcaaagactattgggaggccatgcctgccatttccctgaaaagcacttcatttaccaaatactaatcagattcgaatggacatcagcccgggcgagttgttaaattattgctgtaatttgaaaaatgagtgtgtcagagtatcagggaagctcaagaatctggccagagctgtcatttagagaggcagaagtggacgtccttgggtgctgagggccctcaggactctcctggcccacaccagtgcctccccacataggcactagttggacaacaagtggaaagatgtggccttccctgctccctttttttttcctttttttaaacttatggtaaaatacgtataacaaaatttaccatctgaatcatttctaagtgcacatttcagtagtgttaagtacattcggctgggtgcggtggttcacgcctgtaatcccagcactttgggaggccgaggtgggcagatcacaaggtcaggagatcgagaccctcctggccaacacagtgacaccccgtctctactaaaaaaaaaaaaaaaaaaaaaaactagccaggcgtggtggcgggcacctgtagtcccagctactcgggaggctgaggcaggagaatggcgtgaacccgggaggcggagcttgcagtgagccgagatcgcgccactgcactccagcctgggcagcagagcgagactctgtctcaaaaaaaataaaaaagtacattcacgttgtataaccatcaccaccatctgtcttcagaatgcttttcatttttcatcttgtaaaaccaaaactgtgcccatttaataactccccaccccaccctttgatgttctgtctttatgggtttgactgctctaggtcgtttattcaaatggaatcatacagtattgtcttttgtgcctggcttgcatcacttagcataaagtcttcaaggttcattcatgttgtagcatgtgctggggatttccttctctttcttttttttaggctgaataataattccgttatatggctggactacatttctttatccactcctctgttgatggacacttggattgcttccacttttggctattgggaataatgccgctataaacatgggtatacaaatccattcctgcctttgaggcttttgtagaattgatagaggctgcagagggtctgggtggtactggccaaagcaaaatgagttggagatttgagttcctgctcccagctttgcagcctcatgagctgtgggatggtaatcacattactcagctcctagaggcgggaaacttcagttgtgtgatggcgccgtaccacctacaaggctaggcgctggagtgttggacatgacgggccatgctgcctggcatgggaactgatactgtgcaggcactcatttccacaacttaagggggcagtgcaaagaaaagagcccacagtagcctggggcagagactaatgccttggtacttcagtttcccctgccttaacatgcagagttgagggtacataagtatttctaccactgcagaatatagagatggttttagatggtacagggagagccttaaagaatacggtggccaggcgcagtggctcacacctgtaatcccagcacttcgggaggccaacacaagaggatcacctgagcccagaagttcaagaccagccaggcaacatagggagacccctgtctgtacaaaaaataaaaaactagccagtcacagcggtgtgtgcctgtagtcccagctactctggaggctgaggtggaaggatcccttgagcccaggaggttgaagctacagtgaactgtgatcgtgccacacactccagccggggtgacagagtgagaccttgtttcttaaaaaaaaagaagatggtgcaagagctctaattctaaatgattatctccatggcaggggatagggtgggtgggggagcctgcatatttgctgtgacaggtatttagtacttgaatacctctttcataaacatgaatctccctttcatctccctttctcaatgcacacaacaggccctagcacctttttgtttattcatcatgtatatttttgtagttgctttctatttatactggttttatgcttatggtaattttcccaaactttttatttgaaaataatttcaaatttacaaaaggtgcaaagccaaaaatagtataaagaacacctgtttaccctttacccagtttacccctgtaacatttcataccatttactttcctattgtattttctctgtctgcacacccgccccacacaccccacgcacattcatcgtgcccctttcctcctgaagcatcatgagcatttgctaagattaaggtgttctcattcatgagcacagcacagctgtcaaattcatagtattctcctgctgtgttcttgttgtattggcctaataatgtctttctagcatattctctcctccagtgcaaggtccaatccagaggcgggtggtgccttccgttgtcacgcctccagcctcctttactccggaacatttccacgatctctttctcttttgcgacattgacttttttttgaggaatacagaacctcctcctttttttgttctaataaaacgtccttcattttgtctttgtgtgatgtgtccttgtgattagactgagattatgcgttcttggctggaacacggcatgggtgatgtcatgcacttctcagggtgtcacatctggaggcacatgatgtccttctgtccctcttgggtgatgttcgttttggtcacatgactaaggtgttgcccagtttctgtattgtgtaatgaccttccttttcttcccaactaataagcagtccacagggagacactttgggatcatacagatattcagccccttgttaaaattcccccttagatttgacatttgttgatgattcttgcctggttcagtcactatcgtaatgggcaggaaaagatgattttccacgttcaacattctctctgtgtttaaaagtcagcccttggcattctgttgtaagcaagacctttcccttcttctcatttatttatttatctcttattggtgtggactcatggattccaattttctaatggtttatagtgcattactgtatttaattattttggtgcttaaattgtcccagagttggcctgcaggaaccctttcaagctggctgtcatgtgcttgcctggtgattttttgagcagtcacttacactttctggcataacatggtgttctgtgttcatctagtacctcctctgcctgtccttggaattaaccatttctctggctcctgtccatgggcaggggtattagaggccaagatttgggcactggatgtgctcatcgctactgaggtatctttgcagtttggccctttcagtggagaaagctaggaaatctatgtatgtacatatacaaagtgtacatttatatgtgcctacatatacatacatataagcatgcgtacacacacgtattttagaaatcatatgttcataccagtacccccaattccagtgaatttacaggttttttttttcttgtcctctcccatcttagatttgtatgtttcttcttgtacactgagagccctgactcctaacaacgtctactcactgatttgcccaatcttataatgcacctaaaagcttcagaattgcttcacttagagttgtttattgcttaaaaaacagttcaggatgtttttgcaattttccctcccccatgcccaccccaatactttacttatccccatatagaggatatatagctgagcacattaattcctcacttaacatcaaggataggttcttagaaactgtgaccttaagggaaattatgtataaagaaaccaattttaccataggtgagttgatatcaacaggagttaagttcatgtggcatacttctggtcacgaaaacatatctaacttctacataaaggcccaaaatacttctagcattaaacattgaaataaatgtgagctgtacatacacttaagaaagatttatgggccgggcacggtggcttacgcctgtaatcccagcgctttgggaggccgaggtgggcggatcatgaggtcaggagatcgagacgatcctggctaatacggtgaaaccctgtctctactaaaactacaaaaaattaaccaggcggaatggcacgtgcctgtagtcccagctactcgggaggctgaggcaggagaatggcgtgaacccgggaggcggagcttgtggtgagccgagatcacgccactgcactccagcctgggcgatagagtgagactccgtctcaaaaaaaaaaaaaaaaaaaaaaaaaaagaaagatttatgaaaacatgtaagataattacttacccgatttttggtgaattaatgaatgaacagcagtcatggtggtggtgggttaaatcaaggaataaatgtttgcaaagtgaaaaatcataaggagcacctccttcctgcacgaggttcaaaaccaatcacaaatctggtaggcttgttgaatgctttcataccacatcatttattgtcatgcatttgtattatcgtctactttatgaattgttatttgacaatcatttgtattcatttattttccaactcgcatatttccagtttaggatcttgtatgaccagtgcctgggtacttcaggacgccaggtgggagccaactctggacagggcaccatcctgtcacaggacaaactcacacgcccccacactcactcagactgcgcctgtgtggacatgccagggaacttaacatgtacatctctgggatgagggaggaaaccagaatatgtggcaaaaacccatgcagacatggcgagaacatgcagactccacatagacggtggccgggactgggaatcagtttttttctttttatcctcatccatgttataatgcaacaatgttgaatgaaatgatgttattcaaagatctgctgtattgtgtttataagctacttggattaatctgagcatccttcctttccccattcagagtggatttggtattcatttaaaataaatttggattcaggctaggcatggtggctcacacctgtaatcccaccactttgggaggctgagatgggcggatcatttgaaatcaggagtttgagaccagcctggccaacatggtgaaaccccatctctgctaaaaatacaaaaatgaggccaggtgtgctggctcacacctgtaatcccagaactttgggaggccaaggcaggcagatcatttgaggtcaggagttcgagaccaacctgaccaacatggtggagccctgaaaatacaaaaaaattagccaggcatggtgatgtgtacctatagtcccagctattcggggaggctgaggctggagaatcccgttagactgggaggcagaggttgcagtgagccaagatcacgccaccgcactccagcctaggcgatggagtgagactctgtctcaaaaataaataaataaataaaaatacaaaaatgagccgggcatggtggcgtacacctgtaatcctagctactcgggaggctgaggcaggagaattgcttgaacttgggaggcagaagttgtagtgagctgagatcatgccactgcactccagcctgggcaacagagtgagactctgtctcaaaaaaaagaagaagaagaagaagaagaaatttggattcttttttaaaatttccagtttaggcttcttctttctcattctcattgatttaattttcattttaaaaatgcatggaatattagcaaactgaagtatccttcctcccttccacttaattcctgtcatctcttatagataaccaacttgattgtgtactgaagaagtctccttcctgtgtttctttctgtaaaaataagcagatttgtgtatgttttcttcttttcctttcttacatacagggtagcatatgtgttccttccacttagcaatgtctccggaaattactccatatcatttctcagatcttcttcattccttttcacagctgtgctgtgtgtatgtaccatagttgattccatcggtctgttatgcctgggcatttaggtagtttccagtattttgcaattacaaagaatactacagtaaatatccttgtgcatgtgcagttgcatacttccagaggtgtgtcttgcggagaaagacctacaagtgggctgctaggttgtagagtataacggtgatttaaactttccttttaagctgtatttaagtgaaaaaaaagtaatagttcaaataaaatgaaaaatagtacaggtaacacagagacgtgacagaaatcataaaagcaagcaaattaaactattgcttcagtcccttcaaactccaaatagtatcataactgaggttcagtcagagccccctggaaatccagcctcagtgcctcagtcccggccttggggaccataggtggaactctgtatccacatagcctactgagctgctttccttggtggcagcagtgtggcgcccgcaccttgggagggaggctggccagtgacaacagggacaattggagttggggcccggagtggcacagaaccgtgccaacttcaggtgtagcactatgaggaggttccctgtgaccctgatcatcaggggaggtcaagtcctctttgatgtcctcttctaaagatgatactcactttagagcagtgagaatctggggagccctttcccccaaaaacctgctaccaactggtcccatgcccacatagcactttgcatagagcttcagggaattggcagacctataagggttgtttcagtacctataagggttgtttggataaaactatcaaaaagaagagcaagaaacctttccttgacatttgaagatctgatccgcattcatctagaaaattaagtggagccactcactctacagctgtgctagctggatgaggactgtgaggtgcagctgtgcgcacaggtgtcacagccagggtgtggaaatcccattttgtgtggagaggcccatgtgggtctggttctgcgtcaagatgtgacacgggggttgggggtgaggaagggggagcggtcctggctttgctgctgcatttccagctgtgttaagaatcactgcacttgtgggtttctgtgcactcatactcaatatccagggttggaccagacggtggttttcaagcagttttgtgtgaagccgtagaattccagaaaggggcctcatggagtgcacgagggagcccacggcagtcagaggcatttgatgcccaccaccctttcctggagcagctctgcgctcatctgctgactgtggtgggatgccctggaaaattgtcctgcaaattagtattcagctgcttaaaaaaaaagttggatgagcttggtgctgaattgtcttcaccctcttctctgctccggaattctgctggtgtccaacgagattaagccagaaaggggacaactacgtcacaaagcttggcctccaggccagggtgctggggcttggccctgtaaccttaggaagtacttggagctgagttcccactgtgtcaaccaagcagggcagagctgagcctggggaaggagaacttgcagctgtaggggaggtgggcctatgccacgtcctctgcctcatggggcagaggccagaggctgggagacgaggaggaggctagcctcacaggcttgcttgggagtcttcagatgtctgatggcaagccttgttagtaaacacaagcaaacctatacatatgacatttaagcatacatctcccaaatatgtgtaaaaatttatgtattataaattatatataatatgatcatgctagtattatggacagtataaaacaaaatagattttaaaagatgagaagcgttaaaagacctactgcctagggaatcatcttgcatgcccactgaggtccatacccactttggagatggccaaggtagttggaggacactaggtgcctgaaggaggctggtgaaggtgaaaatggcagaagggaaagagaattatgtttccccgacagcagtctgcaccacgttcgaactcttttttttctttttttttcttttttttttttgaaacagagtctcactctgtcacccaggctggagtgcagtggcccaatcttggctcactgcaacccccaccccctgggttcaagcgattctcatgcctcagcctccccagtagttgggattacaggcgcccgccaccacacccagctaatgtttgtgataggtttcaccatgttggccaggctgatctcaaactcttgacctcaagggatcctcttgcctcagcctcccaaaatgctaggattacaggcatgagcctccacgcccagcccacattccagctcttggccatatctgtgtactgtttgctctgctgtttactggatagctttctttgaattgactcacttgtttttttcccaaaatttagccttattctaagcactaatatccacagaaggctttctgtgcagctagaattttcttccaatgcacaatgaaataagtacaaaactatgcaaacaaagcatttgtccacacaccacttagaaagcactgttggctcccacctgtgtgatggggcccgccctgtgggagactctgatctttgacatctgacttcagatcagatgggagggaagggggatggtgagagtgaacctcacatagggccggggcccatgtgaatatcggggcgggggggggggtgctcctccatgccaaggggtgcctgcaggtacagtcatgcctaacagtctggggagagtctcttggggcatgagatatctccccacgagaacactttgtgaccacattgatcacagactttgtcggggagtggcccaccccgcctcagatcacagctaccatgaatcattgccactcgggcccgctgccaaaacatctcgtgttgggctagaccagtcgctcatttatcacttcaagagatacttattgtgtgcctactctgtgccagacactggattagacagtggagaacaagacacataagacagctacaaaacccctgttctagtggaggaaggcagacagtaaagaagcagaacaatagagaatgtaagagccaagtcacaatgaatgctattattattaagtaaaatcaagataagggggaggaaggacaaatctcctctacagaagaatgccaaataatttatggagatacgcgaagacgtttcagaacctaatgtcccattctctaagtgtggcctgtgtttactgactttcttccacagagtatggtatggaaggaggaggaaaagtgacttcacagtggcgaaagctgatgaacattagcttggccaagtattggagattaacatcaacagttataagtcatattgatagtatgtgccctgataggatgtgatgagaagggtacttcccctctgtggtcctcctcctcaaaacctgtaaccccagtctaaatagcagaaagacattgcacaaacccagagtgagggactctcaagaatgcctgaccagtactcctcaaaatgtccaggtcatcacaagcaaggacagtctgagaaacgtcacatccagaggaacctaagaatgaggactcaatgtaaaagggatcctggaacagaaaaaagacattgggaaaaactaatgaaatctgcccaaagtgtagagtttagtttagttaataacaatttttaaagaggtattaaaaaaaaaaaaaaaaaggcaggtgaaggccggtgtggtggctcacgcctataatcccagcactttgggaggccaaggtgggaggatcatttgagctcagaagtttgagaccagcctgggcaacatagtgagaccccatctctacaaatactaaaaaattagccgggtgtgctggcatgtacctgtgttcctagctactcgggagcccaggtggtcaaggctacagtgagccatgatcacaccactgcactctaggctgggtgtcagagcaagaccctgtctcaaaaaagaaaaaaaaaaaaaaaacaggtgaagagggcgtccaggaagatgtctccgtggaggcgacatgtgaactgagccttgaatgatgcaccccagtcacacctggctaggagagacctggtgtgagagccttccaggcagaggaaattactgtgtaaagatccttggatagaaacaagcttgggccaggcgcggtagctcacgcctgtaatcccagcactttgggaggccgagacaggcagatcatgaggtcaggagatggagaccatcctggccaacacggtgaaaccctgtctgtaataaaaatacaaaagattagctgggtgtggtggcgggtgcctgtagtcccagctactcaggaggctgaggcaggagaatggtgtgaacctgggaggcggagcttgcagtgagccgagatcatgctactgcactccagcctgggcgacagagcgagactccatctcaaaaaaaaaaaaaaaaaaaaaaaaaaatggagacaagcttgggatgttcaagagatagtgagaagcccagcacagctggagcagcatgagccagccaggcagggatggccaggaggtaaggtcagaggtggactggggccaggccgtgtgtttggatttcatcttgagagtgatgagtaggcactgggagttttgaacagaggagtgacatgagctaatttcattaaaatcacttgggtttgtgtggagaatacattagggtggcagaagaggtggcagacgtccctgcatgagccggggggagggagaccatggcagaggcggtgtctgagcccaaggtatgtgttcacatccctctggaaacagaagtgcaggttcacattttgtcatctcttttaaccccctgtatgtctcccgaaggtggggaaaaagatgtgaactctgagttccaaaggctgactgtttgaaagtccacgcccgcacagccaagaactctgatggggacaccataaagcccaaccctcatccatctttaattcaagatgttttctttggtggttcataactttttctgaaaaataaaaatgcacaccatgcttaagctgattgctacaggttacccttgtttaatggggagaaaaaatgaggttcctaatctctctctgccttctggaagttgtaagtaaaaaaggaaaacaaaaggcttcagtcacatcagagctttctattaaaaatgtaagcagctttaggccagacatggtggctgacgcctgtaatcccaacactttgggaggccgaggtgggtggatcacctgaggtcaggaattcgagagcagcctggccaacatggcgaaactctgtctctacgaaaaatacaaaaattagctgggtgtggtggcaagcgcctgtaatcccagctactcaggaggctgagacaggacaatcacttgaaccctggaggcggaggtagcagtgagctgagattgcgccactgccctccagcctgggtgacaagagcgagactctgtctcaaaaaaaaaaaaaaaaaaaatgtaaggagctttagaatgttgtcagtgaggttgattatgtttatcaaccacatgtcatatcttctcagctgcctgaaatcctttgggaaggaaatgtggtatcaataaagtaaaaaagacgattttaaactctcgaaatagaataaatgattgcaatttgtgttttgttgtcaaagacaggaacacgtttcttggtgttgctgtgatgaatggaaagagaggctctggcctctgtcttatttccaccccagtgtgtctctggtgttcaggtcgctgctgtcggacatgtgcttgatgtgtttggagtcatttatgcatatttattctccaacatgagcatgtgtataaatctagggctgaaaagctgtctggactcatcccagtctccattttggcttccagagatcgagatggtgatcatggagcgtagcaagctctcagagctggccgccagcacctccgtgcaggagcagaacaccacggacgaggagaaaagcgccgccgccacctgctctgagagcacgcaatggagcaggtagctgcccgagaggtcgatgctgagtgctctctcagggaagaggagagggctcagtggggaggttgagccctagggccagagcctcttctgtccctcagcccgaccatgctgcctccctttctttccctgcttctccagctctggccacccagaagcatggagacggagccatcactcaacactgtaatgctcactcctttgcaaagagattcgccaggatagcgcaactctctccctgccctgctcctggcactttggagcttggctctgtctaaaggacatgggttgcttcacattggctgctcctagaaatgctctgctgctccaaggaaggatcccctcagtagctgggcttggatctccctgcctggttcattccctgccctgcacacacaaacacataccccatctatagggcctgccctcttgacttggccacatgagttggtgctgccatccacctttgactttttgcctgattgttcatttcatcgatggccatctgtagctacatcttcttaaacctgggtgaccccacatttcctggaaccttgccatagcaccagcccctccacaatgggattggagggaaggctactcccagcgtatgctggtagctggtagcagggcttcatttcagagttatttccttacctcgcagccccactgcacagacccctgcaacagcctcctgattagcactaccttcctgttcataaatgcaccacaccaggatttctctgtcagcctgcgaggcattcacttcctcagcccctagggaggggtggtggaaatacacacggccccccatcctctttagtaatccaacttcaagtgaagatgtgaagtccactaatttttttcctccacatcttatttgtctctttgcttggcaaatgtttcaatgacttaacagatgggattaatttttatcagatgtgcaagggagccatttttagtttttgctaaataaaaaaacagtggagtacaaagaccttttagattttgcttcacagcaaaaaatgtaactcccaaagctctgaaaaataagtaattctaaacacagacggttggggacaaccttggcacagcattctttagactataaataattagaagagccccaaataaccagtagtgggatgttgcttaagcaaaggaagaggtatctgcttaatggaggattaggccaggcatggttgttcacacctgaaatcctagcgctttgggaggccaaggggggaggatcacttgaacccaggagtttgtgactggcctagtcacatagtgagaccccatctttacgaaaatattaaaaaattagccgggcatggtggcaggtgcctgtagtcccggctacttgagaggctgaggtgggagattgcttgagccagagaggtcaaggctgcaatgcactatgattgcaccactgcactccagcctgggcaacagaatgagactctcgctcagaatatctgctgctgcttttaggtgaatactgtcatgatgtgttcagttccttagggtttgataaatggaaacagagaacatacttttcgtagtatggtaatactgtggctttgctaatggaagagaaacacccatgtatttctcccgccaccaaaaaaagggttaaaaaaacagaccaaaatgttatgtttgaatattggggttgatgacttctttttttctgaattttggtggagagaagggttttcttagagttgattgagattgtttcttaactttgggcatcttgaagcacatggcttctaatggaagctgattcagttgccttgagttaggccgcatgcagtcctgggaacctccaggccagatttctgctagactgtgagactgaatgccgggttagagactggcccaggtggagagcagctttctcctttgtcaaggtatcgagttgcagcttgtaagaaactgccactgccctctgtccccccaacttgagcagttgggactacaggccagagtcaccatgtctggctaccttttttttttttttttttttttttgcaaagacaggatcctactatgttgctcaggctagtctggaactcctggcctcaagtgatcctccaatcctcctgcctcagccttcctgaggcagggagtgggaaggaaggtggctgtttgttctctaggctgtgaattggatcttggcgttggtccacttgccccaagaaacagcaaggtaaaaaacagactgtttttatattccccatatattatgggctctgtctgcactgggggttaaatataggcctaagaggccgggtgcagtggctcatgcctgtaatcgcagcactttgggaggccaaggtgggcagatcatgaggtcaggagatcgagaccatcctggctaacacggtgaaaccccgtctctactaaaaatacaaaaaattagctgggcgtggtggcgagcgcttgtggtcccagctactcaggaggctgaggcaggagaatggcgtgaacccgggaggcagagcttgcagtgagccgagatcacaccactgcactccagcctgggcaacagagcgagattccatctcaaaaatatatatatatatatatatatgtatatataggcctaagaaacttaaagctttcgaaacatcgtttcttttcttaaaaaaaaaagtttaaaattatgaaagtatgcaaaatcttaaaaagcataaagggggaaaaagtcttcactgctaacattcagaatcagggggactaccattttggttattttttttaccagtttttttttttttttttccgatgtgaactttctgggaatttcaccctcccttctcccagaagcttggaccgtattgtgtctataattttgtattctttttttccatctaatatcaactcccaagcaaacttttcaccttattctaccctgcgtaaacaaaacgcttaatggttttatgatacttcatctcataaaagatggtacccacccagctattggcatttggttattcatattattcccaaatgaaaatataatccaaatttcaagcagctgatttacaagaaaatgttatcctactcctaagtctggaagtgttattgctggaggctttcaaaacccaaatctacacatggcaaaactattaacacatctgaaaggtggtgccccatctggggctgtggagaaatggggatggaacataaatgtcccctttaagattttcattttttttttttagtttttgtgtgtcacgtgtgtgtttgaaatgttatgacaagtacatttttcctactttttttttttgcatttttcaatgaaatattttgtatcagagatacatgtatagagtcaaaaattcaaaactgtgtcaaaggttatatagtgaacactccctgtttctccccagtcccctttcactccccgtaggcatccaatgttcattggagcttgggtgtccttccagaaattaaatgtgcccttggtcactcatgaaggtgctctgttctcttggcctcagcctggcattcagagggggcagccacagacagtgggaggatcagagcctctggcctgtgggccagacctgtgcatattctattctcctggtgttgaagagtatttttctgtgaggcccttcacctggaaaggcagcatttgggatgtgccatttccgatttttgcagcctctctacagatctcacccacaaagcatcagaggtgagagacctcactatcgattcttcgcagtcagagaaagtcagcctgagaaattgctgggtcaggaccctgccaaagtgaaatcatgaagtagtgcccttggtatattaaaaatagaaatcaaatagcagctcccatgcattggcaccgtccacagtgcctgaccctgtgctaaatgcttttcagtcttcattgcgcttgaatcctcacaataatcctgcaaggttggactccaccccatacagatggggaaataggttttatgtgacttgcccaagggtttgctgaataaaaagctaagaagaggcagaatcagaatttgaacccagacagtctggcactagggctcatgttcttgaacttgtttggattgttgtttgtgccttgtgtgacatcacactgtcctgttttcttcattggcttgtgacacacatcactttgcattgatgtctgtttgttctgtgtctaccagctgacacgggagctttggtgtggggagtttgtataattgattccctgtgtctggaatacctggtgaatgattgttgtgtgactaagcaagcagtctgttccttggtcaggttcccctctggatagcggcttccccaggcagagcctgtctctcatttgtctgtgtcctcagtgcgtggtgctggaccaggcacacagttgtggcctaaagagctgtgtcaaaggcagctagcaccccatgtgcaggttagagaggggaggtgttcacccttgtgcaccgtgaggctcatacatgcccctcctcttttccagacccttcctggatatggtgtaccacgcgctggacagcccggatgatgattaccatgccctgttcgtgctctgcctcctctatgccatgtctcataataaaggtaagcacccttgccttgcctgacttccttgctgggccctgcatacccatagcatccttcccctctgctgcatggaggacaaagaaaggtgctttctgtacagaatttcctttctggttttggtggtcctttttggttttgactcccgctcctctttagcttctttagaatttctcaggtgtttttctaccaactgaagccacaggaattggttactcaggcaatatggaggaaggtgacttgagtgcctaacccaggatgactatattcaccctgtggttttcttttgaccccttgatttacaactgacttagcgtctgacctctttcctaacatcagaactgaaatcagtcaaattgtaatcttggttttgctatttataacacttggtgttcttattctgtgttcagagctgaaatagaccctgggtggacttggtggaagcataggtttcctttctgaagaaaggtgtggttctctggcttcccctattaaggctacttggccaggatccaactcccatggggttgacaggttttgttgggattcattcattcaccgccttgctgccgacccctgggaatagttactgttgtttgccccacctggcttgacatgggcacgttctgaaacctccacatcagaatctcttcaaagaagaattcaggaatattccttctaacccctgccaagagctaggcttggcatagtaaaaaaaatcaagtgatattttagtaggttttttataagcttattggggagtagatagagttgggttttactaagacagcctatggctagaggcattagaacatacatgatataactaagtttatgtgttcttaaatcattaatcatgataaataagttgattagtggcagaagggtatatagggaaaaagtttcccacctttgaccccagctctcctcttcaaaggcagttcctgctaccggtttctcttgtgtctttttaaagatagccaaacaaacccaagtaggagtatatatggttttatttgtatgactgcccacttagctgtaaatggagatacccatattgtgctttctaccttgctctgctcacatcatcatatttcagcacatgggttcacatccatagagaactgccattcttttttatcaatgtgtgagcaaatcatagatattaaggatttttgcatctatgttcatgactgatactggtctgtagtcttcttgtaattctcttgtctggttttgctatcagggttatgctcacctaatagaatgaattgagaaatattatcttctccttgattttctggaggaatttttgtagtattatttcttccataaatattccttaaaccagtgaagccatctgaatatggagttgtctttggtggaaggtttttaaccactcaatttcttcagtaggcatagggctttttaaggttacgtatttcttcttgagtgagctttggtaacctgtgtcttttaaggaatttgtcatttcatctgaactgtcaaatttattggcataaactttatgtttttcctttattatctttttaatgtctgtaggatctgtagtgatgttccctctctgattgatggtattgataatttaggtcttcattttttttcctaatcattttggctagaggattattaattttattgctaccctctattgttctgctgtttttgattttgttgatttctgttcttatgtttgtttggggtttttttttttttttttgccttctgctgcttccaatttaatttactttttgttttataacttcttataaagaagctttaggcattgtgggaagcactttattgtccacagccaagctgcttgtgatgaaactgtaacttacaagaaaagggctgggttttaaaaatgacacaggctctaaaaaccctggaagcggtgcaacttttggcaggaatgggggttagcaggacctcaatggctcactatggctaagtgaacgctgactgggtcctccagcgtgagctagaacagacgtctctatggtcaagtaaacagcgcgcgtgctgtctttcccatgtggtggggttgcgcatgatcagtagctgcaccactagaaagatggcggaggaagagcaaagaaaaatccctttggttccagaaaatctcctgaaaaagaggaaggcttatcaggcactcaaagccacccaggcaaagcaggaacttttggcaaagaaggagcagaagaaaggaaaagggctcaggtttaagctactggaatcattcctacatgattactggcagcagaaacctgacaaggtgcatctcagacgactagaagtgaaacctcatgccgtggaattgccagataaacattccttggcctttgttgtacgcatcgaaaggattgatggcgtgagtttactggtgcagagaaccattgcaagactttgcctaaagaaaatttttagtggtgtctttgtaaaagtcaccccccagaatctacaaatgctgcgtatagtggaaacttatgtgacctggggatttccaaatctgaagtctgtccgagaactcattttgaaacgtggacaagccaaggtcaagagtaagaccatccctctgacagacaacacagtgattgaggagcacctggggaagtttggcatcatttgcttggaagacctcattcatgaaattgcattcccagggaagcatttccaggagatctcatggttcttgcgccctttccacctctcagtggcccatcatgctaccaaaaatagagtgggcttcctcaaggagatgggcacacttggctatcggggtgaacgcatcaatcagctcatccgccagctgaactagacccaggtgccaaactgcagtatatttttgatcaatgaagtggaagcatgtgttttgttgttttgggaatttttatcaagtgtcttcagagaagattatttcctgctctgtcttcaaaaactggaaaggaagggtcaaagaaaagacagtagctggctgggcgttgtggctcacgcccgtaatcccaacactttgggaggctgaggtgggcagatcacttgaggttgggagttcgagaccagcctgaccaacatggagaaatgccatctctactaaaaataaaaaattagccgggcatggtggcgcatgcctgtaatcccagctactcaggaggctgaggcaggagaatcgctcaaacgtgggaggcggaagttgcagtgagctgagatcacgccattgcactccagcctgggcaacgagcgaaactctgtctcaacaaaaagaaaagacagtagcttatgttcatgtcaagcacctctcatcagagtctagttccaaggaaaaattccagtgttttctacattgggtgctgcgtcgtctgaaatcggcacattccatggaggaaggagtcctgctttgttgcatctatcctagggtttaatgttggtaaatgagtcactctagcatttgtacaaggctccctaagactcctgcagcagtcgaccaagcccaaggacataattgaatctggagagtcctggagccttgttttgaaaaagacttgaaatacacataggaagaaaggcataaaaataaaggttcacttgtctctgctgtggaaaaaaaaaaaaaaagaagctctaattattgattttaatcatcgtaggaagctttgatcattgattttttaagcaaatcagcttatttttttaaactaacgtaccataaaattaactcatttttgtatttaattctgtgaattttgggacatgtatggataggtgtgaacaccacttaatcaggagatagtacagtttcattatcagaaaaatatccctcaggctattccctttccagtcattgatttttaaacctttcttctctatgactttaatgctataaatttccctgtaagcactgctttacctgcatccagtaaattttaacatatgaggttcattcagcttaaaattttacacagtttcccttttgatttcttgtgttttgtcatgtgtataatttctagctgtgtttctcttattgatttttctcctgcttttggattccttcccccattttttgcatgcctggtcatttttgattggttgacagttactgtggtttttcacagttggatgctggattcttcctgtaaatatttttgggctgatggttcagttaattggagttggtttgatccttttttgaggcttgcttttaagctctgtgagagctggtccagacagccttcagtttagggctaacttcgccctattactgagacattacccttctgagactctactgtgtcccatggtgaggtggtctctccacactggcccccccagtgtgagctccaggaattgttccacaggcttcattctggcaggtctttccctttcttcatgtgcatgcacagaccagaacacagcaaggttctaaaggaaccctctgcacatgtctgagctctctctctgcagctctctcttcatttatcttgtccatgaattttaaccccttgatctccctgaactccagactctgccttctctgagagaaccacagtctttgggttttctatccctttgctgaggcccggatactctcactggacagcaagctggagcaatcactgggccactgcctttgtgcttctccctctcagggatctctctcttatgctgcctgttcatccagagtctgataaccattgttttgtatatattgtcttgctttctaagttgcctgaattagtaggataaattcagtccatcttggccagaagcatagcacctttaaagaaaaagttggattgaagtctaattgatatgcaataaactgaacatatttaaggtgcacaatttaatattttgacatatgtaaatacccgtgaaatcatcaccatgatcaaggcagtgtataatccagcatcccaaacatttcctcattcccctcccttgcttcccacacccctctccccaagtaacaccagtctgcttcctgtcatgctagattagttttgcactttctaaaattttgtataaacagagtcatgcaacatgtactcctcttcatgtggcttctttcaatccacttaattattttgagatccatcatgatgttgtgtgtatctgtagttcatttcttcttgctgagtaacattccattatatgaacataccacagtttattcattcatctgttaatggaaatttgggttgtttccagttttggactattacaaacaaagctgctgtgagcatttgtgtggccccatacaatgtatgcccatacagagagttgtatgagcatatacattcttttctcttggataaatacctaggaatggaatggctgaatcatatttcccatataattatgggagatatgtgtatgtttgcttttattttaagatactgccaaactgttttccaagatgcctatataattttatatcccatcaccagtgtacaagagttctagttcctttacctcctttccaacatttggtgtggccacctttttagttttcaccattctaataggtttgcagtggtatcttatgatcttaatttgcatatccctaatgacattgaacatcttttcatgtgtttcttttgccatacatgtctttgttagtgaagagtcttttcgaatccttagcccgttttttaaattgaattgagtaaaaaaaatattgtgtttcgagacttttgggtttttttgttttgtttcttttaagacggagtctcactctgttgcccaggccagaatgcaatggtgcaatcttggctcgctgcaacctccgcctcccaggttcaagcaattctcctgcctcagcctccagagtagctgggactacaggtgtgcgccaccacgcccggctgatttttgtatttttagtagtgacagggtttcgccctgttggccaggctggtctcgaactcctgacctcaagtgatacacccgcctcagcctcgagagttctttatgtattttgaatgcaagtcctttatcagaggcatttagcaatgatttcccccaagtctgtggcatgtcttttcattttcataacaacatcttgggaagaccagatgttttttaatctccatgaggttcctgtggcactttttaataccgccttttctctgtattttttctctcccattctggactgctaggccttggaaggcagaaaccatgtgctccctgcagtacccagcctaccgcctggcactcagtcagtgctcagccagagtttgctgattggttgctgctcagctatgtggcacgtccccaaggccatctcttcctggcagcttgtagctcagggcttcagcaaagaaggtgctgtctgtgtggtgtagatgccaggctccatgggacagtgggcaagctcctcatcttggtgactggtgttctccatgggcttccttcctgcagccctgacctgtacggggagcagagacgtcatggcttactgggtgtgctgccatgcaccttcatccatcttatgcgctggagagaccactcacctgtgttcccgcctgggcatcctacctctttttcttgggaatttcttcttggaagagtagaactgtatattcaaggaaattgaattccttctcccattttctgctaatgctatgcatgtattgattcattcattcttccaacaaatattttggaagcccctgttagatgccaggcactgggatcagtattggggatgcagtggtgaagcaaacaaatgctttcatggaatctggattctcttagaggagacagacagtaaactagtaaccaagtaaaataatcccatgtagcgagaagtgcaacagtgaaaataaaactaggtaatgtggtggggcaggctgagggtagagggtactacatccgcctgagcaatcaggagaggcctcttggaggcttaagtgatcaggaggaatagcttgcagtttctgatgaatttcctcatgtaattagttattcagcaaatgcatgtggagcaccggccgtgtgccaggcagtgtgctcaacatggggactacaaactccaggcagaccaacccaggcccttgcccaagaaagcatcagtcattcttggacagaaaagtcctacgaggaggctgtcagcacaatagagggtcacttgcctggtggtgagcatggactctgcccgcaggagtgaggacccgtttcctgaggacacccgggctatggtagaggacagagcaagaaggggcatgagagcctgtggcatatccatcagatcactgcccgttccctagggtgagtggcagcatgtccgaggcagcgggtgccccaagaggcaggcatctggagccagtctgcagggggtggcacaggcagcgactgaactgtgttcctatgagccgtgtggggctgctggggggcagttggtcagttagtgagctgacccactctgcacctctcagaatgggtttgcagtaattcagccagcgggtgggagggatgagaggtgaaactgagaggctttcttatcattcagcagatacttgctgagcgcttgccagggcaaggccccgtcataggcactcaaacaagcccagatgagtctcactgaagtgaacaagaagattaattgtgactgtgacaaatggtagaaggaaatgaacagggtggagtgatgaggaagcctagtggttgtgctgcaggggttactaggtgctagtcagggtggtcggggagggctcctctgaggaaggaccagcagagccacagcccagagagtgagaaggagccagctctgcaaagacctggggcaagagtcctccaggtgaagggagcagcatgtacagaggccccggggtgggaaggagcagaaagtgggccaaggtgaggctggccaggcgggcaggggccaggtcatgaagggccttgaaggccctgaagaggaattgccattttttttccaagtgcaatgggaaacccctaccgaatttttaagtaggacagtgatgtggtcagatggaagtttttaaaagaaacgttggctaccagacagaaagtagatgactgggggtggggatgagttgcaggagggaacaccgagagacttgctaagaagctgttgcagtcatccaggcgagataatgtggattggattaggctgctggctggggagtagaggaaactggaaggacttgtgattatttcagcgctagagccaggacgtgctgatggattgaatgtaggggtcgagtgaaagggacgagtcagatgactcctgtgatttggcttgagcaatggtgggggtgcatttactaggatgaggagacaaggagagtcactaggctaggggtgaggggttctggttgatttgaaaggagggggcatgaagggaggagcctgggtaaggctcaggttcctgactcctttccctgtgtgaccaatagtgccatttccagaactaacaagcatgggccttggagtaggtttggagaagaaacggaaaagttcaagtccggtgccctgaggcccaggtgcctggggaagctgcctcgtgggggagctgccacctggtttatgctcagtcctggcctgtgagcacagagtctgcatttggtggggctttgctggtggaggttggttgagtgattggtttttggttatgcagcagctgatcaggctgcacttgaccttcagcctcacttttccagatccttaccccccaaatcaggtcccaagtgacctggtctctttctcatagattttttcctcatagtcaattttaacataaaagccacgttcataaaaaccaaatgtgagctcaggccttccagtaatcataatagattagatgctgcaccgaaatgaatatcccacagtggaaagggttgaccggttggcggaaggcgcttgttgtgattcagttgggccacataatgaattctggtttgtttctgtaatagaaaatgcagccttcgctcttctatcaagtccgctgagtcctgggccagaggtggagggatgggggtgagttttacagcttttgtatcttgaaggttccccagttcagtgaccaaccttctactcctgccactccatttgtcattgtttacccaggaagaaggagtcttgggctctttgtgttttgtgttttgttttgctgagaagttaatggaacatggatgagcgatatggaaaaggttgaaaggtaataggctaaagggaagcttttgccatgcggagaacttgcacaacgtcagtttggatcttggctgacacataaccagaattagaagtacattggaaatcggcccaacatctggttagctttcgaaatctttggtctatagtcttccaaagctggtaatacttgtgtgactgcagccaaggagactttgtgtggtcaacagacgtttttaaaaagtttgaactgtttacctggtgttctcgtggtgtctttatccagatctgtctaattattcttatgcatctttggtctgggtcttttacctctctaccctaaatgggggctactactaagggggaagaatccagatatcagaactgagagggaagcttagtaagagttactgacactgtggggccacacccttcccttctgttttggattctttgaatgagttagttgagagttccgccctccacccctgtccacgggtggacaggggacacccgttctgagtcggtgggcagctcaggctctgacccctaaggcagggctgtgggcggggcagggaacatgtggtctgctggaagccagaatgagctagtgctcccgtgaagtgcagcagggtttctttggaatttgtctgtcacaaagcacttaagagttgaagcaaataggataatatattatccacagtgtttatttctgtcagagggaaatgactggcaaagaagctattgggtttgcagcaaaacctgcctttctgtgaccaaaaaccacggggtatgcatgcgtgtgtgaatgagtgtctgtgtgtgtatgagtgtgtgtgtgtgtttgtgtgtatgtccttgcacacaggagccgtcttacctttcacatgcatgcccctgttacagggtgacattgaccttagccactcagaaccatcagccaccaggttgtttcaggcaggaggcttaaacctaaatctaatgttcgccacaaattaaatgccatcctaagtacagtgatggtcatgcaatgattgttatagaaaacaaaaatgagaataagttgctttttcacttgcctttgatagtaccaccttaaaataaccaactgctgacagtgtcgtatttctttctagcatgttttctgtgtgggtgatggttgggcttttttgcacagctgtcatatggtggcttctattttacgtatgtttccccttcattttgagatttgtctaatcttctgcccgaaatttgatcaaaactacttaactttttaaaaaattaattcagcaaaaatgtatggactgttgtgtttgtgccaagaacaccactagatcacatgacatacatagcttgggaaggtggagggaaagagcgttaaccagcggggatcatggtacacggcagagaggagggaggtaagagccacatggctgcattcagggctgggctttccactctccacatgaccccaggcaagctcatgtcttttttgagcctcagcttcctcgtctataaaatggaaatactattagccacttcatggaatgtcatgaggatgaaatgaagcattctacgtcatatgcctggctgatggtcaccatttcttcagagcttaccatgcgaaggcaatcttgtcatcttagcagaatcctctcctccttccttccaaagacactctgtccttccccagagagactggtgattttgttgttgtttgtttgttttgactgagtattttggtaaatgataaggcctccttcaaaacactggatagttggagtcaaagagaggattttaaaggccatggtgggaaaaagagctgggagagagaatggggcccctggcccagaaggagctttggggaaagaagggagatgttcagaggggtttctgttatatagttttgccgtgtgctgtgtggaatcacctctgctctctgcctcccagggctggtggtaaaatctacctcacatggactgcatggcactagcaggtcagtttggggtaaagggccggaagcatggagaccacttggaacagtcaggggaatggaaccaccccagtcagccagggcacaaccagattatgttacggcccgctagctgcctctcctgggcccctccactgcatcaccctccaggatcctggcacgaagccttgcctgtcccttcccccatcctccacctcatcaccccctccccggctctctcccacccagacctctctgggtctgctccactccctgcagtcccaccttggtttggcaagtcctggccctccctgtccagttcaaggcaaactcctgttcatcctttaggatccaacctgagcagctcgccccctgagaggggcccccagcagctcagcatgcctcttttgggctgtctgtagcttgatttagctcttgttaggttttatccttgtgttcttttgttctaattttccttttttttttttttttttttttgagacaagagtctcgctctgtcacccaggctggactgcagtggcgcagtctcagcccactgcaacctccgcctcctgggttcaagcaattctcatttctgagcctctcaagtagctggtactacaggcatgtgcactacacccagctaatttttgtatttttagtagagacggggtttcaccacattggccaggctgatctcaaactcctgacctcaggcgatctgcccaccttggcctcccaaagtgctggtattaaaaacatgagccaccgtgcccggcctaactttccttttataacacgaatgataaggaaacacatgaagtcatgctcaaactaaaaattctcatccatgcattaagcagtgctcaaactaaaaattcccatttgtgcataataatgagagataaagttgttggcctgtgacagtgctttttctctttcgatcctgacagcagtcgtggggcgggtagttaccataattattcccacttcacaggtgaggaaactgaggttcaaagaggtaaagtatcaaaacaaagttcctcccgcaccccaccgctaggcttctcattcctgctgtacccagctgtccccctaagagagggtgagcccagggacacagaggggtggcttttgtcagcccaagaggacgggccccctgtgtgctcctggtgggctggctgtgtgggtgctgccaccctttcccatttggaccccacccaccttcgggatcacctgaaagtggtttgagctgtgtctctgacttgctctgtgaccttggggaaacaacataacaactctgggccttaacttcctcatgaaaggaaaaggctggacttggaacctggtacagagagaagtgtttctatcctctgggaccttcccttcacggagagttgagaaaagtcgagatcatcttgggacgcttttcttcctgtcaagaaaagagcttgccccagatttcctcactgtccacaaattctaaggagacggaggggcaatgataggaaagaaacaaaatggacctctctctggaaattcaaggcctggtcctagtttgcctctttccatggttctgtggccactgccccattctagaaggagcgagcagccaggccctttctgctatcctctctgaagcggagtgactgctgatgggttataaagttgggcaatgcacctgggacacagaggagcttttattccccacccccacccccacccccacccccagaaccactgactggcagttctcaaagggccagaaattaacgagtagagagatgttaggacagtgttaacatctctggaaaaaacaaatgccagaaagattcagttgacattcttcttgccattcaataagccagaatccttcagagttacacatttagcattaacatgggatacagaagccacaaattaaattttcactgcaatgaaattttttgaggaaacccacatttgtggggcgttttggggcatgagagagactactaccctactcaagtctttaggccgtccctcacccaggtcatctccttggtatgacttagcctctttctgggagctggaaggaattcagaaaagcaagatatattgttacttcttattacatcaatgtgcatgtgcaggagttacttagaatccagacaatcatctcttcaatgctatcttccactattttgtcaaggttctaaatgaagcgtcatctggtactcaagggaccgtattttaagagttccgagaagtgccacctttcccccttttgtagagtaacaggaaaagacgtggtacaagcgcaaataatccattcagttctccaagcttggatcaagcaaaatatttgtttctgtaagtgtatttttgaagagccacgtcagttgagcagataaggagtttgaagacctcttactccaggcaggaactgttctagtagccctaacaggtcttctgtcactgcaggtcctgtgtgcttctttaggagaaatgacaacagggctcaaagtcacacacttgcctgttcttctttcctttcccacttaccttccccacccccatctaatattttatctttcaaatgctgttagttttggcaggaagaattgttgaattttcactggaggaaaaatgattcccttgcctcttaatgatagatctctgctgtattggtgtcattgtattaggttggcacaaaagtaattgcggtgttccaattgcttttaatggcaaaaactgcaattacttttgtgccaacctaatatgtgcacctttctgtaagaaaggcttagcttagtgtctttctgctaatgtcaccctcaggggcaggcgtggcctctgcctcacctggctcacaacttgattcctcctacatgtgttgagggtggggctcagcttttgagtttgtcattaaaagcttgagggcacaattgttggggatgactgtatttccttcgtgtctagtctctctttctctaggcctggatttcctcaagcgtagaaggtgcgtaatacgggagtggcctcaggtggccctcagacctggcacacagtggcagtgagttgtgctatgggatggtgtcccctttttctactcccttccctgtgtctaggagaatgccaccatttggggctagcttctctccaacactattaagtacctgccaacctccctttttaacaaagatcaggtcttgggccaccatgagtaggcagtcaaaagtcattggctagcatgcaaaaacattttttgatttttaaaatattattactggcaattattgcatcaatcctgatttcctatttataagaaatagaaaatgtatgttttaatacatttatgtaagttcagtttatggagagctctgcgataagttatggcaccaacagcaaccagtcatgacagcagttgccaagaggggacaggcgcagtggctcacaacagtaatcccagcaatttgggaggcccagcacttggggaagcccaggagttcaagtccagcctgggaaacatgacaaaatcctgtctctattaaaaactaaaaaaaagaaaagaaaaaggaaaagaaatcaccaagagggaacatatgtggctgaagttgaggaaaccccactctacaggacctttcggtatgaggaggtcaggtagtcaggaggcctccacttacatccttctcctctgttccaggcatggatcctgaaaaattagagcgaatccagctccccgtgccaaatgcggccgagaagaccacctacaaccacccgctagctgaaagactcatcaggatcatgaacaacgctgcccagccaggtgcccacttggggtgttgtctgtccacagggccacgcagttgtaggaagcagaccccactgggagcctgagccctgggtgctaggcctgagccttctgagaatccgggcccatcccaacctctccctctgcctctcaacccctgcatcctgggccagccctcctgcctgctgggactgtgtcttagctctgggtctccttttgccatcccatcccctgccacttggtaaccatctttcttcttccacaccccgcccttcttttgctgagattgtcaatgttttcgcccccaccccgctatgtctgggtggcccaaggtaatattatgagaaagaactaggctgacagtggagtgaggggagaacattcgaaggtttaacgggccagtagacgtaggagacagagttttgttaccagcaacagttgtgggtaggtatggaaacaggtaggagtgagaatgcgcttggagaaaaactcacttggactgggcagctgaagagaggttacgctagtgctggggctgagtggggtggggccaggagagccgatggagccgagaccacccagtccttggtcatccctggggcttgtattatgtttgggaagacctattttttgtgatagcgctttttcttttcttttttttttttttttgagatggagtctcgcactgtcacctgggctggagtgtaatggagtgatctctgctcacggcaacctccgcctcccaggttcatgcgattctcctgcctcagccttctgagtagctgggattacaggtgcacactaccacacccagctatttttttgtatttttagttgagacagggtttcactatgttggccagactggtctcgaactcctgacctcatgatccacccacctcggcctcccaaagtgctgggattacaaggttgggccactgcgcccggcctgctgtttcattttttaggcagatccccttttctcacttattttcacctgacttacaatgcattaacaaagggactggcagggaggtgggcagaggggtgtatctgcctttagttttttcccagtgacctatcgtggtctctgatgtttccaaggccttagaggcatagcctgaaggcctcctcctctccacagtgggacctttcaccagaaataaacttgaaagacccacagaggagtttgcataagagcagttgtccttcagtcagtcagttacagatgcttctaggagagatgccagatgcgggttttggctttctgagcacctgcagtctaccactacccagctatgagacctaggacaagtcacttcacttttctaagcctcaatctttccagcactcattgcaataggtttttatagagattccttcaggacctatataaagtgttcggcactgtgcctcgttcacagtggtaagtaagtaatagcatagtaagtaagctgtgttagagctctcttggtcttgacagaaacccgactcactctggcttaaacaatacaagcagacaaagctgtgttagcttataaagactgctgaggcctagcttcaggcaaagctggatccaggggctcaaacagtatttttctacctttggcctctgccaccttctgggttgacgagataaatgccagcccctccagctagccctttctgcactgagactctagacttactctacgggagacacttagatttgaacagtctagttggaagagagatctcgaagtgatatttgtagaatactttactaagattaaaaatgctggcaagggtgaggaggtggccgatatagattataatgcttgtgcccctcagggcgtcaccacggtcctctgctcagcccggcacaaggagaatttctcttaacccagcagttccagcagattgtgaggttgagccttactggctctgactggctcccttgcctggttcttacctagtcactgggaccaagggaatatggagcaccccaactggccaggtgatgtgcccaaccctggaacggggaaggaggatcagctccacccaaatcacatgacccagagtgggactggcggctctctaaaggaagtgggggtgcagggccactttccaggcctcaacagtgtttagtcaccctctttttcctgcaccctgtcagtaaagggacttcagggaagtatttggtataggtagttttgatggagaacattgaattctaactgatggggaatggtttgggcatggggggttcccactgtgtccccactggatgttgggagccatgagcagttggtctatcatgtgacctgctagcctcaacgtggataggcagcagtcttgggtttaagggcgccccaccctgggtgtgcaaggcttaccctggtgtgctctgcagatgggaagatccggctggcgacgctggagctgagctgcctgcttctgaagcagcaagtcctgatgagtgctggctgcatcatgaaggacgtgcacctggcctgcctggaggtaacgccctctccgctcctccttcctgtgggccaagggagagggacaggaggacaggagggaagctgctggcatccagataggagccctggcccgtggtgtcatcggtcaccagctagaagcagcaggggctgctctcttgagaccccactccaacctacttattcagcagggacttcctttcagccgagactcgctgaagagtccacttaattgagttttagtagtttctgttgcaattatttgattctgtatttgtcctcaggatttctgaattttttctttggtattacaaaagtttttttgcacatacaaacacatcaacacacatacacacattgattatggtttttgtgtttaaaatatatgttaaattttcagtggcttttatggtacctcttattttctatgtttattttagaaaatttaggaagtagaaaggtaaaagtaacaactatagttgacattttgtctgtgtctgtgcacacacacacacatattatatatgtaaataatatatttaagtattataagcaaataattatatatataaagaagtatatttacatatacaatatgtaaatattatacactacgtatatttacatatgtaatatgtaaatatgtacatgtgaatatatgtaaatgaaacatctatttacatatgtaaatgaaaattcatttataagtgtgtatatatgtttgtgtatatatatacacacacacacacacatgcttacaaatgaattttttgtcttatacaaatgtagttgggccaagtgcagtggctcatgcatgtaattccaacattttggaaagctgaggtgagaggatcacttgaggccaagaagttgagactagtctggacaacatagtgagaccctatctctaaaaaaacaaaaaagattagccaggacatgcctgtaaccccagctactcagaaggctgaggctggaagattgcctgaacccaggagtttgagactgcagtgagctatgattgtaccaccgcactccagcctgggccacagattgagactgtcttggaaaagtaaaataaaaaaggagtcatgatggccatattttataacccattttcccccaattaactgtatattaacagcttctcatgccattacaatcgaattacctatcctttccccattttcattttgagctctgtctcctttcctctctctctcattaagaactattttataggccaggcatggtggctcgtgcctgtaatcccagcactttgggaggccgaggcgggcagatcacctgaggtcaggagttcgagaccagcctggccaacatggtgaagccccatctctactaaaaatacaaaaattagccaggcatggtgatgggtgcctgtaataccagctactcgggaggttgagacaggagaatcacttgaacctgggaggcggaggttgcactgagccaagatcacaccactgcactccatgcactccagcctgggtgacagaacaagactccatctcaagaaaagggaaaaaaaaaaacaccattttatacattaaggatattagtccagatctgttttatacacactcatgttttagaattcgtagtttgcccgacttgctcacctatatgagacctgcctccttcacaccttccttctcttttaacagggtgcgagagaagaaagtgttcaccttgtacgacatttttataaggtaattggcagagcacagatggacagcagcatggtgtgtattgtagaaacagaagtgtggtgtctggttctatgcagataaacgttatatgtcttcagttattttttatgcctataattactgaataaaaatgctcaatttcatagtccctagagtagcaatatctaaacttttctgtccaagctgtcttatcagtaaaatttttgaggactcagccccagtatatgataatttgtttctcagtaatacatggatttggttatttgggaataattatatgtaaattatgaactacgtacgtataaacacatataaataaattatatatgatgcacttatgttcataagttatatatgcttacacatataaaattacttatgaattacatatgaatttatgaaccatatacatgtatattatttatattgatatgtgctaagaaaccttatacagacttctaaacctctattaacgtttattgagattttgtaaagtgccaccatgactttcagtatctgaaaaatttgcagagctttgtcttcaggttccagatggttttataaatatctaattgccgccaggcatggtggctcatgcctgtaatcccagcactttgggaggccgaggcaggtggatcacctgaggtcgggagtttaagaccagcctgaccaacatggagaaaccccgtctctactaaaaatacaaaattaggcatggtggcgcatgcgtgtaattgcagctactcgggaggctgaggcaagagaatcacttgaactcaggaggcagagattgcggcgagccaagatagcgccattgccctccatcctaggcaacaagagcgaaaactccatctcaaaaaaaaaaaaaaaaaactaattgccgtggttttgttttagcttttaaggcatatgttttagtccatttgggatgctaaaacaaaacaccataaactgggtagcttataaacaatagacatttacttctgggccgggcatggtggctcatgcctataatcaatcccagcactttgggaggctgcggcggtcagatcacaagggtcaggagaccaagaccattctggctaacatggtgaaaccctgtctttactaagaaatacaaaaaaaattagcctggcatggtggcaggcgcctgtagtcccagctcctcgggaggctgaggtgggaggatggcatgaactggggaggcaaagcttgcagtgagctgagatcgcgccactgcactccagcctgggtgataggtgagactccatctcaaaaaaagaagaaaaagaaatttacttctgtcagttttggaggctgggaagtctaagatcaaggcagatttgatatcttgtgaaggctcactttctcatagatggcaccatcttactggatgacctcattacctcccaaaggccctacctactaatcccatcaccttgggaattaggatttcaacatatgaatttgggtggtggggggtggtggggagcagaaacactcaggccttgccagcctcatgtgtctttcagggaaggctcatcactcgtcagccatggtggattaatccataggtcaagtagtcattttctagtttgctggcctccggatcaggtctctgcagatcctgcgagtgatggtttcccctcttaacgtggctgatgaagatcctcctacatggggaaggtggcaacactgccatttccttgtcccctgtactttcattattcaagccctctttaagctgctgtttctttgcaggaatcgttttaagcgactgcattattgtcagtgtttgttgagataaaatgaggttatatgatttggagatcgaccttgccaggctcagatgaccccatccagctgcagcagtggacatacccagacaagggtggcaccgtggtgggcccctacacactgaggaggaaatcccactttccccttagaacatcccaaaccgcacttggcctccaagtgaggatacaccctcactagcaaagcccacgagaaagcagaaacctcagggttgcattagtcatctttgaacctctttccagtataactgccctaagtttatgtcctctagaaagcttttggattgcaaaaacagaaagacatataggtaggcattttcccagagggttattctttattattaacaaaaggagagctttatttaaattctggatcccttctcccaacccagatttttcttacttttatcccataacatttattataccctaagtataatttctcagcagcttttagatgttttcaggaattgtctttcctggtggtggtagttatgtcacacaagaatattcaaatttagttgtagttctgacaactgaaaaaacctaaaaaggatctattccctttcccaccccaagtgtggggtgtgtgtgtgtgtgtgtctcattcagaacttgtgagagagatgcagcagttctaagggtcattgtccagtagagattaccatgacagtgagtgctcacactgacccaaccctgaacgagtgacaggttctgtgcctcctcgcatttcatgtgcattaactcatttcatcttcacaataccctagacagacatgccattcatgcagtggaacaaggaggcgagaggtgtaaagctggatttggttatgtgtatcagaaccaagactatgcccaccgtgctgttctgaaggggccctcccaggcagtcatgaccctgaggaacaacataaccccgaaagcactcctcataaacaaatagaacaagccatgtaattgtaatgttaaacttatttaattatactcttccttccagaggtgtggagccttgtatctttaatgtggtaacttaaacaggattgtccatttctccagccgttctcgacaaaatagataatgttaaacacttgaaatattagccttttctatattttaatcctacatagtagttttttttttaattaactgctttgacagaagaattctaactccatatacttaaaaaggaaggagaaaattttgaatagtgcaatttgatatttggtctgtcatttgagcgtgtgtgtttgtgttcacgtgtgcattttacttcctggtgatttacgagaactcactaatgagaaacagatggcctctaaagccacaaactagagtttataatactctgttgtttatggaaaaaaatatgaataatctcctcttccctcccttcctttctttttagggagaagacatttttttggacatgtttgaagatgagtataggagcatgacagtaagtgaggggctgggacacacttgggctggtgtgcgcctgtgtccctgccaagctccccctgcccatcccagagggagttttttgacttagggctttgtgaccaaatagcacagattgatggggaagcagatttagaatggtgtcttgtgatccccaccactgttaaaatttcagactatattctctccctctaacatgggaggtgtccgatgaatcaggatgattctctgctatgaatagtaattttggggacagtatcattttattgaggacttactctgtgctggatgtatatagcatgctgtacagattatatctcttcatcctcacaccaaccaacggtaatagctactgccattgtccctttcttgctgaattagtctcttctcatactgctacgcagaaatacccaagactgggtaatttataaagaaaagaggtttaattgactcacagttccacattgccggagaggcctcaggaaacttacgatcatggtggaaggcacctcttcacagggtgacaggagagagaattagtgcaaggagaaaagatgccagatgcttagaaaaccatcagatttcatgagaacttactcactatcatgagaacagtataagggaaactgctcccatgattcagttaccggcacatggttctgcccttgacacgtggggattctcatgtgtctcaccattcaaggtgcgatttgggtgaggacacagagccaaaccatatcacttgctaatgaggaaactgagtcagagaggtctagtgatgtacccaagtctgcccggccggtgagtggcagagccacgcttctagaggaggacagcccagccccgcatcccccgtgcttctccatgtattatgtccctgcctccctgtttgctgctccactggaatgtttcagcatgcagctctccctccagtctgtagtgccagcacatgggcttccttcctcctcccgcaggcagaatcgcgggaagccataggttcagaagatcccagctttctctgctttgcgcgtttgtctctgttatcccagcacctgcccttggctaggtactccataagtacgtgataagtgatccttcttgtggatattacccaccaaagcatgtgtgatttgggaagtttataataaacctaagtgttttaagtgtcaaaaagaaaaaggcagcgtgcactaattggctccttggcttcgcagcccattccctaggaatcgggacagctgggccctcaccacgtcctttgtcactgcatgtctgaggctgccgtggagccttttcaggggaaaggtgtaaattggcataagtcatctccagaaacaccccagcagcaccctgtgccaggcccccgtgggctgctcatctacagcccctcatcattcctccagccccttcgagagaggctcagtcttccacccttcagaccattcattagagtggaagggattcagttgtcatttgttatttcctcttacccccgagacatccccctgcaatgtcatttcctacagtttggtttcctgtttggaaatgtcaggcttctatggcacttgaccatgtgggaaagcttgagctcttaaacccctgctcagtgtctgcttttgacaatgcaaccttgagtgcattgctgaaattctgagccttgatttttttctttttttttttcgaacagagttttgctctgtcgcccaggctggagtgcaagtagtgcgttctcggctcactgcaacctctgcctcttgggttcaagcaattctcctgcctcagcctcccgagtagctgggattacaggcgcccactactacgcccagctaatttttgtatttttagtagagacggggtttcaccatgctggccaggctggtctcaaacccctgacctcgtgatccgcccgccttggcctcccaaagtggtggaattacaggcgtgagccaccgcacctggcaatttttttttttaaatccgtaaggtgggggatccctacctcatagccacccaggctgtatatgaaatagccaacaagaggcctcatgggtccatacacaacaacaaatactcatgggtctatacacaacaaatacttcctccccctcccaccatggggagcttcccaggtttttttgtttgtttgtttgtttgtttgttttaatcaaacatgtattgtgtgtcctatacaatgcctggcattccagagaaatacaaaggtgccacgcccttgctctgtatctgaaaatcagtcctcagccttcaggaatgcagcttctgagtggaagggggtggggacaggccctccaaggccagctgctgtaccaaagtcagaccatgacttgtgacctttccttcatttcccttattgcctctggtttaatgcaaaaggttcagtgaggtgatggcctagctctgcccccagcaggcctgaggggttcactgggaaggttgtagggggcagcaggagtagaggggaagggagctgcaagtgaatgagtgaggcaggaactgccacccctgcggggttagaggatttggagtgggggacctcaggcttctggaggaaagtacttaaagtgtccaaaagaagaaggcaagcagcatgcaccaagtggctccttggccctctggcccattcaccgggtgtctcagtatgttttctgcagctataacagaataccacagacttaatttataaaaaaaagaaatttcttacagttctagaggctgggaagtccaatatcaggtgccagcatttggcgacggccttcttgccacatcatcccatggtagaatgcgaaagggcaagacagagcaagagggaacagaactcactcttataacaaagtcactctcaccatcattgagccacacctgcaataacaacattactccattcatgagacccaatcccgtcttgttaggccctacctctcagcactgtcacactggggattaagtttccaacacatgaactatgggggacacgttcaaaccatagcaccaggtatctgggccactgagccctcgctacatccctgccctatgtagtcagctttacctagcaggagggggaaagtggtatgtttgaagcccactttctgaaaagagaagacacaaggaaagcttgtgatgtttgaaagagtaaaatgaattctgcagaaagcttacccttcgtctgtgaagccagggaaatgaaatgttagtgttcaacaacacgtgtgcattgattactactactgatgcagcagagatctgggagaggtggcagggaggggatgtcaccctgtgtcttagtcctcaaagaaggcttcgcagaggtggtgtggaaagaggccgtcagctctggcccagtggccgtgggcatgcgcctttcctcctctgagctcagtgtcccttttatgatgggcccaccagcacctgccgtccagcaggaggtgatcccagcacgtgcctggcacttagtagatgctccaataatgattgtgttatattatcccaggtaagatgtgaaggggacaaggaaggaaggggaaacattggtcctagggtgggaatcacagaggccctggagcaagacaggcctgggctcatgtcttggctctgccacccaccagctgagcgaccttggatccatttttctgcttctctgagactgtgttccctcatcagcaaagtgggaagcagctcctcaaaagcccttaggtcacagcttgcagcggaatcagctctcgttaaacggaagctgccatcgccatagctgttatcatcactggaaggacagagaggaggaagcaggtggcagacgggcttgcacccacagggataaagcatacctggcctcctgctgagaatccctgtccctgctgaggtggagagagaatgcgaagaggagcaagcttttcacagcaaggatgcaacttctcaagagtctgagctgctgcttcaattaaaggaaaaatctgcaatttagaaaaccaaaaggcatattgctcccttatctggctgcctctgtgctttacttcaatctaaatccaggatttagatcactcatttacatttactaaatgcggttgaaggcgaggggcctgtgcaacctcccccggccccttcctccttccaagtaaggaatctgctttgaggtttcctgtaatgtctcttctagatgaagcccatgaacgtggaatatctcatgatggacgcctccatcctgctgcccccaacaggcacgccactgacgggcattgacttcgtgaagcggctgccgtgtggcgatgtggagaagacccggcgggtgagtgagcacaggacctgtcatctcctgggccactgttctccagaaccactcccagaccagggaggaaagggcttctttgtcaaagtcaagagcctgccctcaacacagcttagacagtggatagagagtacccatttgcccccaggcatgactttccaaggcatgtttttaccctttgggaagtagggtttggcattccgttgcatctggcacccagtgttggctgcagagaggtagccttcaccagtgcagacagacaagccctgagctcaggagtgtaaggcaatggggccagttttctgtgaaccatcgggggtgagcacggtacatccagtgcaggtgaggttggtgtgaaatcgtagcccagcggtctcaggacccccagagatagtgcgatgttaaggcatctacctgctcttgggacacagtcaaattaaatgtgaatctcaccagcctgcaggacagatatgtgtgaaaagattagttctcagaaccagctgcagtgtgtgcttccgttatcagccctttttttccgaagcaggtactctaggaagcagtgtcctcaggggtgttcatggtattttatctcccgggtaagatcagagtttctttcttagaaagcaccatcaccttttcctagaaaatcattcactggagacatgagtatttgtgtatagttcagaggaattcattgcacacagctccccttgtcagcctttatcatctgagttaattcgtgtgtgacagaggtgtttcacttttggattttgcaaaacaggaatgacctgtcatttgcacctcagacacgaggagtctgaaccttcctccctgcagctggtggttctacctcggaagcctgggggtgcagaggaagtgggacccatgtgtcttgagtcaatccacatttccaactgtctgaccaaacccacaagcctcaccgcaggacccaccctgtccggcccactgacgccttccttccatgtcctccctgccaggcacacgattctgtttgtgggtggcagtgtttgcactggacgtcctggcatcagctttcactggaggactggttctgacagatgtgtatgtgttgcttcatgatgctgacgtgctcacccccagccagggctacagcatcctgtgccaagaaggccccacctgggagatccccccgcacccctgagccagaaggtccagaggactgaacgctgagcactgctgctctggattccactttgcctttttgttgttgttgttgttgttgttgttttggaggctgcagtgagctgtgatccatcctggagtgcagtgttgcgatcatagctcactgcagcctcaaactcctgggctccagccatcctcccacctcagcgtcggtagctggaactacaggcacaagctaccacacctagctaatttttagatgttttatagagatgaagtcttgctaagttacccaagttagccttgaactcctggcctcaagccatcctcctgccttggcctcccaaagtgctgaaattacagacatgtaccaccacacccagcccacactctaccttcttttggttcacagttcatcagggtttttcttaccacttctatgaacacatagcctctgttatgaagtagatcaattcaaatcagttctttatgtgaatttcctcattaaattctataaccatcctaggagattggcactattattatccccattttacagaggaagaattttttttttttttagacagggtcctgctctgtcacccaggttggagtgcagtggtgccatcttggctcactgcaacacactctgccccctggggtcaagcaatcctcccacctcagcctcctgggtagctgggattacaggtgtgtgccaccacactcggctaatttttgtattttttgtagaaatggggttttgccatgttacccaggctggtcttgaactcctggacccaagcgatccgcccacctcggcctctcaaagtgctaggattacagatgtgaaccaccacgccctgtccacaggggaagaaattgatgcatggagaggtctggtgatttgctcaaggtcacccagctagtgagtagctgagccacaagtcagcccaggcaatgtggcccccagaacctagactcttaggcattctgatccactgcttcccacactgccttcttgagatctgctggctctgctcaggacactgggacagcaaaaacacagccccagtcctgaagaaatcagagccttagaggtcaaagtgggaagagacagtggcaggtcatgtggctcaggccattattcaagcagcattaggtcaggtcactaatcccacctggagcaggaagtgggacaggcatcagatagggaggcataggcccagagacaggtggcacattctggcaccaacacggcagtgattgcagctggagcccacaggaggatgtgatgaggctgggggtgctggcaggagccagatcacgggagccttggagccccttgagaaccttggctgtcacctcttaacacagtttcatgacctcatgccctgctgggctggggcagatggtcctgatccacaggcgagagatgggagaaatgcaggggccagtttgtcaggcatgtggcagaagggaggttgcttcttgtctactctgagctgctgtctccatctgtcaagtaaaatgtgcctgcctttccagagttatcgtgaggactcggcagcaagccaatggcaggtctcgatgatagtctttttgcccctcacatgtcacagagttgcaggttcccagggctgtgctgcccacctcccttgtcctggataggatgcacaacccgagtggctggctgaagcacagatagagaatatctcagcttctctagagtctctttgcctgtctgacaagtttccaaaagcaactctcaagtcctcccagggtccctgggtagcagaatgatataaaagaggccaggctacctcaaagccaaggcatccactttagaaaagcttcctttgtgactttaataatttctttctgaagggtggctttggccactcatctcactacggttcctgttgcaaggtagccatctagaatcatccagaagcttagctcttcaagcccacttcagaaatcagaacacaccaatgtgctttgaatctgagctaaaggaagttacatggtttagcaagcaattgagggcttatgtggttcgtttcaagttttttgcttgtatccaaagaacattccaagctacccctttggattcaaaggttttctttctttttttttttttttttccaccaagtagactttttaaaggaggctgatcctttttagaaactccatcctttattttccttaaggacttgtcaaagaggttcaaacaattctcctggcaaatcattcctaaatattcatagattcatcaaagagctgctagattcttgctatgtgccaaatactgtgttagccttgggggtgaagaaatgagtgagcacacatccctgccttctggaccgctctttttacctagtgaggtaaagtttattaacaagtaagagaatagcaggttgggtatcaactcacagtcagagctctggaggaaagaaacagcatgccatagccaggggctgaggagcgctcctcctgcagatagagtgatcggaagagcttctctgcagagttgacatctgagctgaaacctggagcatgaggaggagccaggaaggttaaagtgataaaggaggcactttccaaacagggaacagcacacatccagtccctgagatgccaccaagtgtggcatgttcaaggagcatagttaagtgagggaggggcaggagcgcagctacaggagaggatggtggtagcgctttgcaggccgtggggaggcatctcacgataacgccgttttccctcttgctttttttttttttttttttttttttttttttttttttgagacgagtctcagtctgtcacccatgctggagtgcagtggcatgatctcggctcactgcaacctgctcctcctaggttcaagtgattctcctgcctcagcctctacagtagcatgagccaccacgtccagctgattttttaattttttttgtatttttagtagagactgggtttccccagtctgttggccaggctgctcccaaactcctgaactcaggtgatccacctgcctcggcctcccatggtgctgggattacaggcgtgagccaccatgcccagccctctcttgcattttaaaaaccacatcacttattctttctttcaacatagttgttgaacatattctaggtgtcaggctctgagtaagatgcaagacaagaatgatgagcaaataatataaaataagaccaaaacagcaaggggtccactgagccatgccagctgagaagggaaattcatgttgaaatgaaggtcactggagctgttggggtccagtgagaacattggagcagaactttgggcttaggctggatccatcccacatgtagggggacctgagagaagcagtgaagaaggaaaacagtggtgtcagtcagaccaaccacgggtcaaatcccaactccagctgcatgaccttgagcgagccactcaccctcccggaacctcaggtccctcgtgggtcttgcctctcagctgttgcccagagtagacgagtgtggctgtgaagtgacaagcccagggcctggcagacagtaagtgctcaggaagcattgtctgaacagagatggagcagtctagtatgtaaggtgggaaagaaatagggtctttcatgatctaaatctaccaaagcttaatgccagagaaaagagagttaggaataggattttttggtgaatatcaaaatccaagtttaagccactagccatctgtatatagtcatcttggaagcggttatgaaacacccatatttgcacgaggttttatttgtccccacattgtttccctgttcctttgtaaaaccacaagcagtttttgtgtttatcactattggccttgaggaaatagaatattttgctttattttttcgatgtgtattatacattaaagaaaatacaataacatctcatgcagtttcaaaagtaaagggaacagtctttcccatgatttcatcaccctaaacaaacaatacttagacatcttttgtgctcctcctatctttgtctgtaaaaagagtgtactgtggtcttgctttcatcccttctttttctttcttttcgtcgtagcacaagaagtttttcatgttgtcacagtttaaataagtctcatttcttatggcctcataaaggttcatctggcattttcttgcaagtagacattttcgttgcttccagtattacattattttcaactaaactataatgagcagcttcatgaatacagtgtttttctttcttttgaattatttctttaggataagttcccagaagcggaatttctggttcaaagggtatgaatgtgtttttttcatgaccctctgcatattgccaaattgctttcccgatgggttgtgcccacattaaactgcttcggccctcttttaagaatgactgactttcacagctacatggcctcagtgggcttctaacttgagtgactgtcgcctaaactaggcagcttgcacatgcagcaaggaagcaggagggtgaaaaccgagcctttgttccaggccagctcgtgggctcagcacatcaccggtgccatcccgttgtacctgcacggtgggtgccccatttccagaacacaagcctgggcttgggcacgtcacgtgattaccaagccccagcttgagccacagtgtgtctgactacagagccacccaccttcccctgctcattggactgattccccggtgacattgagtttgccagaatttgcttccagactcattgaagcaaagaaactggagcaatctctttatatttgagcttggtcagctgtcatccttttcaaaatctaacctgttcttcctgggtcagtccttcctgatattctatggaagaatctgaaagaataataatttatttttcctttttaataatacttttaaatttgcgtctttatttagcaaagaaaagcgctcaataaaaccctgggtcccaagccttaaatcttttggaggtcaaggagtgtggttggaagaacacagagcttggaatctagttattcactaactgaccttgggcaggctgcctgtcattgctcagctttggtttccccatctgtaaaataggaaccatgcagagtcattaaaagcttagatgagacaaccccgtacagctggcatagtatgcggcaggccatggggaatcaagagagtgcttattgttttgggtgtggtggggtgaattttatggctcttatgctcatattttagctttcttttgtgaatttacagagttgtggggctgcccaatgtgcctaccaggcccttataacccccctacccccatgggagcccaggttttgcctcgagtggagctccccgccctgtgggaatcggcccgcctcagattcatggacatggcttctcatgtgtccttccttctcttaggagttggggcaggaaccaggaaaaacattgagagattttattatacagtcatccctcggtatccatggggaattggttctagggctcccccaaggataccaaaatccacagatgctcaagtcccttatataaacggcgtagtgtttgcatataacctatgcacatcctcctgtagactttaaatcgtctctagattacttatgatactgagtacaatgtaaatgctatgtaaatagtttgttatactgtattgattagggaataataaggaaaaaagtctgtacaagttgagtacagatgcaaccctttttttttttaatatttttgatctacagttggttgaatccacagatatggaacccatggatacagagagctgactgtatgtgtattatattctattttatatttatgatgatgattgttattatccatgtgttgtttgcaaggcaaaagcagatattggcctatattgggagccaaattctgaacttttaaagtatttattgaaaggttacagtttttcagagtggtgggctgcagaaagccacacgtttctgttttcttacccacctgctctggtcctgcatgagttatttgccttcaaaaccccaagaggaacaggcgtttgggcacagaaatgagcgtctccttgacttggacctggctgtgatgggccgtttcctttctttctcatcctcatggtcatgactccttatttgagagctcaagctgccaaatatttcaagtgaccacccacgtcttgggctttctgtacttggactgccatggatgtttaagtttcctggtgcacttggttaagtgacacacatgtcatacattcctgagttcacacccagctcagccacttagcaggtgtgtgagctgaaataactctgcccctctcagctctgtttcttcctccataaaatcttcaagttacaataaggtgcccacagttcctgccaccccgtaagtgcttaaaaaatagaagttcttttgaattttttaatggaactacacttctttttctcccaattgttagagatgtctttatgaagactgtacttttaaaaactgttgacaatcagatacgaatgctaccaccaccatcatcatcattataacttaagagctgatctttctccagtgctttctggtttacagaggactgcactaccttagcatagggccaggagataggattgctcttccagttccaacattaggaagttgctccaaggtctcccactggttagggcgcaaggcagcactgggtgtaagcaggctgaccagctcctcattgcctggggtatgaggaggcagtgtgagtgcacctctttgcagacagtaatttggcccctttctagttttgggaggcacactgctgtatagagggcacctcccctcacctaggtccagactgcagccttcagagccataaacaagaagacccaaaggcgcactgggattcgcctttgcagctccctagtggtgacagtggtttgtccccccaaccccactgtgctggctgctttccctcctgcgttatctcagaacctcctagcaggcatgcgagctatcatgcccattttacagatgaggaaaaggaagctcacagaagtcaggggacttgcccagcctagtggaactgggaatctgatgtagacctcatgtgtctgactctggagctgtccccatggggcactgcaccctcagtcaggcccagcagctgtgcctcagggagagaggcctgcaggtggccttttctgtggactgcccctctgcttccttgctctggttggtgggcaagcctgtcctggggctggaggctgctttctgcacacacggctccgactgctgggactctgctttgtttctgctctctgaaagtacctggtggccacacaattctgaccagacaccacttctatgggccaggaatccctgtgctggtggatccacctgtgcccctggtctgctggcagggaaagcctgaggggcattcagggaaccaaggtcactgcccacctgctaggtgcgaggtctctgccccgtcagcagcacaccccctgtcgtaagaccaagggagcgggagttgaagagactcacccagggtaggattttcctcaggtctcaggccctgcagcccacaggcatttcatttcaccctcttctgtctgccccacccccgtattcagtaggtagtaccttgaaatgcttttggagtgattgggttttccagagcccatgctggtttggttgggacagacagactcagggtctagcccttgctggaagcatggcctgggcaggtcacttcaccttcttaggtctcagctgcccggtctgtgaaatggggctgactgctgggcagggattattatgaaggtcacctgatacttggggacaaggtcctggcagatgacgggtgctcagttcaggtaaagtaacccaaacctgaacctgtgaataactgaaaacaggctactccccctttgatttttttttttctgtcttgttataaaagcacgtaccagaatcaaaacacccgaagaggtgggctttattgcgtttctttcttttttaatagagagtcatggtgtcatttctgggtgtggggcatctcactgaaatgactctgcaatctcactcttctctgctctctgaactgttggtccaggccatccgggtgttcttcatgctgcgttccctgtcactgcaattgcgaggggagcctgagacacagttgccgctgactcgggaggaggacctgatcaagactgatgatgtcctggatctgagtgagttggctgctctgagtcacagcagggggctgggggacatgggacatgggacaccactctgctgattcacacgccactgggagggtcagtgtgcaacctacattttgtactattattgagctgtgaccttgagccagcggtgtgcatgtcccatgcaggttttgaagaaaaggcccctgggttctctgagatcagtttgagggttctgctttcacacagctggttctctaaaaagtctctgcagagcacctggaggctcaagcaagggtgaacaaactccagggttcctgtcctccctataaacatagtggcatcggtttggttggttttatatattaagcattttctatatgattctaatgataaaagggttctgctgctaaagaaagaaacttgtaaaaagcaaaacaccagtgtttaggtaaggatgaaggctttggaggctggagaaccacgtgctcagcccataaccttgagctacttgttccgctgtgtagtgcctcattgttctcatctgcagcatgaggctcagctttagagaagacaatgggcataaagcctgaccgtgttcctggaacccctctcgtatttgtatagctttctctttcctccatttgctacagggcacaggcacactaatgagcagcatggttttctgtttcttaacggcattgtggtatattaggagtctttggttataagagacagaaaactcaccttagaccagcttaaggaaaagaaagggaaattggctgatgtcactgggaagtccaggagtaggctaccttcaggcatggctggatccgggtgctcagacactgtcatcaggaagctgccttcctccgtctcccaactctgctttcctctgttcatcctcaggagggctctcaccaggtagtggcaagatggccttcagcagccccaagatttgttgagccagctacacagccctgatggaaagagaagcttctctttccctttaattctctaaagtctggggtagacgtgttattggcctagcttggggcacatgaccatccctgaaccagccagtggtcagaggaatgtgactcactgattgtctaagctggggtcgcatgcccagccttggagctgggagggagggagggccagttccttttgaaccccatcacctgagagagggaagaggcgaccctcaaaggaaagccaccaaagaagggatggtggctgggtgggcagaaacagcacagggccactctctgtagcactgttgttgctgttttaaatcagctttattaagatataatttatatacaaaaaaactccccaagggttagtgtataattcaatgagttttgacaaaactatagagttgtgatctagaccctgctttgtattcccttgaacaaatgacaggacccccacagcctccgtttcgtctcctgtaaaacgagatggtctttcttaaaatacagaattgttttcaggattgaatgaaatagaacatgaaatatcacgtgaccaagcatagtgcctaccgtgtaactgtactcagcaaactgtagtcagtattacaggaggtcatgcgtgtgaagagcatagcatgccgcctgacacgtagaggttctcagtgaatgagtattgtgtgttacctggttgtctggtttctttttctggccttatttatgttttatctttccctttcttggaagaataaagcagctgtgacgcctctctgcctgctgcccaactcctttggcccttttgcccttgagaaatggccacaggaatttctctaagggtttaaattgatcaagttggctgcaaagaatcataaaccagtctttctctgatttgattcaaggagagaaagagcttgctttgggggggtgggggagggcagtggggagggggcacttcatcagggcagcaagaatgtttgcatccgtgaaatggaattaaattttatgctgggaattcacattccttctctcctccccctaggaatggcctgctggaataaaggttcaaagtttttcacttatcaattttaattgattagattgctagttgagatcacttaactgagcctttttgggtagttggccattaagaaagtaatggctgtttgtctttgcccagcctgattgcaaattatgtcttttgctaaggagggcgactttcagaaaatagtagggattatggaagcacgtggtactaggataagatatgcctgtattgttggtttatttggtttttttcttctttccttttttttttttttttttttttgagggagggattgtaaatgctggagcttctcctcaccttccattgtgggggaaaatcaccctactgtgcaatctgaccaaacgccttctgtatacaaaatacaggtgaaggacaggtgaagccattcttgcttgctgcatgactggaagctgggcatgtttttgtctccctgatgaacttgagaaagctgactccgggagaaatgttagggactgctcaccatttacctgactccatgtggtctgctaggcttaaaggagtgctgtctccaaacagcaggaagaggtggcgtaaagtgtattcactgccccttgtcacacttcagtaagaaacaacagcgtaaaggatattccccagaagccaccccaagtgcttgctgaccagcagcaggtctctcggctgggtgtgacagccgagctccggctgtcataaaaggtggcttctcatggggagcattaaagatgtggtcaccactcagcaaagaggcaaactggtcatgcttaaagtgaagcctgttttgtttttcactagagaggagagtggcagagggcagaggtcaggaactggcagccacgtgtgccacatctgctggagtgatggggggctggggtgggaaggaagagagagaggaagggagggagggaagtggaaggaagttgaagggaaggagggattggaggaagaaaggggaagggagggaagggaagaggggaggaactagataaaacagtggatttctagagaaaatagcatcatgaatctccatatacccagccctcagcttcaacagtttttaccatttagctaagttttattttatctgccctttcatctgtctatttaaaatacgccacccacccacacagtgtattaaagcaaatggaagacatcatattattacatctagaaatacctctctctaacagagaaggactttgtattgttccttttaatggaattgattgccaccatttgcaaaccgagtgcctccccagccccagctgctgctttggaatggaggccagggtgcaggggcctgtagacagggcctgtgctcacccatgtgctgccgcccgggtcttgttgacatttgattttgcagccactggcatcattggagtaatcatctttgtaatcttccccagagtcttcatgcctgtgaggctcagtagccttacctttgaaatggttctagggctggatgtggtgactcacacctgtaatctcagcactttgggagtctgaagtgggaagatcacttgagctcaggagttcaagaccagcctgagcaacgtagtgagaccttgtctctactaaaatccaaaaaaatagccggttgtggtggcagatacctgtagtcccagatacttgaggggctgaggtgggaggatctcttgaacccgggaagttgaggctgcagtgaaccctgatcatgccactgcactccagcctgggggacagagtgagaccctctttcaaaaaaataaaaacaaaaccaaaacagggttctaaaagactttccaaggagctcaaatgagatcacatgtaaagctcacagcaccatgcttggcacttagtaggtgcccagtgagtgggagttggctgcttccctgctgcagctgctgaatacgcaagctgaaactcatcctgctgggctccatggggctggcattttctgcttaagcaacactctgagaacagtgtcctgagacattcaggtcattgctcagatgatggcactgttttgaggggtaagaaagatatagctctggctgctttggccagaggaagggagctgtatcccgtctaggctgtgagactcactcactccagtgtgcctcctgaacagggacaagcaggctttgaggagaaaccacagattccttgggattgacctcagagcctccttaaaggattcttgcctgtttccaaatatcatgagcaaccacaataggggagaaatctgtccattatccatacaccccaaagagacacctggcaaccaggtgtgttcagtgtccagtttccttgcagcctgttcatgtgggcacctaacattcacatagttgcagccatagcatgtgctacatgtatctaacttgtattctgatttctaaaatcaattcgtgaagcccattcaatgaagacccattcatgcattcagctatttattgagcacctgctgtatgccaggcacagtgctaggagctgagatgtgagagtgagcaaaagccagacttcacttctgttcttgaggtgtttccagttgtggagggagcaaccactaacaggtaggttaagtaaatgcatgatcacagactgattgggatggctccatagaggtgatgagcagggtccatgctggagaataaccaggaggaaaatcctcatgggctggttagggaaggcctctctgaagaggtgctgtgccaggagggaccagaagcttctacgagaaagcacagaaatgaggactgccttttaaggatggcagaggtgaggctgaggtgggagagagggtgctgtgtcccagggtcctcacagaaacttgggtggctggcacacaagtagcaagagtgggtcagtggctgggaagagccagatctcaactacagggctttctcacagggacatctgtcccaaacggacacttctagagctggcactgcctggtcagacggtcccagaaggggccttcgagctgcactgggggctagaaaggcctgcagcagggcggcgaggagcatggactcaggggccagactgtgcctggatggaagtcccagctttgctgccttctgcttgccagctgtattaccttaagggaactgagtctcccggcacttcagtttccacagctgtgaaataggacttgctgggaggagtagatgagcattatctgtgctgtgcctagaacagtgcctgacagaattgcagagaggccatttaggaggctgtggcagggaccaggggtcagtgctagtgggcaaagagggacgggacagtctgggtacagcattttgtgacagtttgcagtggcgatgccagagagctcggttaactctggggttctgagcttggggcagtccagggggcaggggctgggaggatggtgattctgtcatcagcagggctgatcctggaggaggagctggttccaagcagaaggtgctgaagttggtcgggcggccaggtgagacgtgccatgagggagctcagccaggatgtccggtgggcgggggagcagtccggaagcctcctcgctacttcatagattcagaactcttgtgtttagtagcctgcatgatattctgttgtctgagacttctgacgtaaccatggtgcaattttgggtcatttttactcttgcctggcataacctagctggctgttcctcaaaagatcctcgcgacagtgtgttagatcatgtggtgtgtaagggaagtcctgaaacctgcagagaaacgtctgtgaataagcagacctctgtacactgggtgtgagtgctctcccaggcttgaacatacttcccagggtctgggggcctggaaaatactcatcaagtacagaacagtaggtcccagcccttaggatttcatagcccagaaaagcatcaaaacaaaaataaaaaacaaagcttttggggacggatcgccaacttttgtttgtttaccgagtagtcatttttaaaaaaagcatttatgaacaatcattccataaaagaaaagacattgttaatattgagtaggtagcacatcatttcagaacgagggtagtctttccaagaaacagtagtggcaactgtatacacacatactgtgctttaatggggagtgggtttgttgttgttgtgggggttttttttttggttttttttttgtttgtttttgtttttttttttttttttttttaaaaaaagcaagtgcagaccaattactctagcaaaagccagtgactctgtctttccaagcttatggggaaggcaaactccaatcacagcagcacagatcaaactcagatggccaccgtgtttcctgttctaagagcaggtgacggggttaacctggctggaggtcagggaggcttctgaaggaggggcccatttgagggctgcagggggggtgtgggtgccgagaagtggcgcagaagaagcaaaggccctggggccgatggggatttggggaagatgagagacggcagtgtggccacagagtcggggagtgggagggtgaaggtggttggcaagatgaggctgggtaggaagccatgcaggccctgtgggcatatcaagtgttcagggttctatcttaaaaacagtgagaaaagtttttacctagctgatgtgatcagatttgtatctcaaaaggccctctctggcctcagtggaagagatttatgggtcagggcagcattacagcagggagccccatggggaggccaggcctacaaggcatgaactaagaggtggtgtccacaagctggcatccacaccaggctcggacagtctggtttgccccagagacttgtcttgaatgctgctctgtccactctgtggcctaggtacaggggcttttattgcacagaggtccatccagttggatccggcgtgttctccaaaccgtcgtacctttgaagctaattattaacaacaacccaactatttgggttgtattcacctcctggcaaggcaggctgctgtggaccttccctttgctctccttctggctgtttccaggccaggacttgcctgtttaaaagtcaggctgcggttatggaggaagccttggatcctagacaaatgcagaccgaatctcagccatgcttcttcctagccatgtgactttggacaaatctattcccctctctgtgctttagttccctcattgatcaaatgagaacagcgatgcccaactttgcagggttattgtaaggcagaacaataaggtggatatagaggttgcaaacagctggtcctcaggcaggtgggcccacaaatgtagcttcatggctagtaaagcatttgcaagcgaattttatgttgctaatgttttaaaatcaggatattttatcgtaaaaacctagctatcaccttgaatatgagacagtgacagtctgtccacgcagagcctgcatccccacaggcagcagtcagttgctcctcttcatgggagtgaacccttctcccagctgctagagtctctgctgaactccagacctgtgtactcagctacctgcccaacatttcttggttaccacaaacacaagatgtgagctttcccacaaaacctgtctccctgcaggcttccagacagttgatggcagttccatgctggtggcaaaaaccacaggctcatccctgactcccctctttctctcaagctcaacttccagttggtcagcagacctattcagcctctgccgcaaaatacagtcagccctatgtgtcctcaggttctgcatctgaagattcaaccaaccacagattgaaaacatttctatttttatttaatttttaaaatttatttattttttgagacagagtctcgctctttcatctaggctggagtgcagaggcacaatctcggctcgctgcaagctccacctcccagattcaagcaattctcatgtgtcagcctcccgagtagctgggattacaggtgcatgccatcacgcctggctaattttcttttttttttttttttttgtatttttagtagacatggggttacaccatgttggccatgctggtctcaaactcctggcctcaaatagtccgcctgccttggtatcccaaagtgctgggattacaggcatgagccattgtgcctggccatttatttattttgagacagggtttcactctgttgcccaggatgaagtacagtggtataatcacggctcagtgcagccccaacttcccaggctagggtgattctcccacctcagcttcccaaataactgggactacaggcatgcaccaccacacccggctgagattttgtatattttgtagagacagggtttcactatgttgcccaggctggtctcaaactcctctgctcaagcaatccacccaccttggcctcccaaagtattgggattataggcatgagtcactgtgtctggcctattattattactatttttttttttatacaaggtctcgctctgtcgtccaagctggaatacaatggtgcaatcatagctcattgccgcctccaactcccaggctcaagcaatcctactgctgcctcagcctcctgagtaactgagatcacagtttcgtgccaccatgtccagctgattttttttttaatcttttgtagagacagggtctcactatgttgcccaggctggtctcaagttcctgagcttaagcgatcctcccgcctcagcttcccaaagtgccaggattataggcatgagccaccatacccagactgaaaatatttttaaaaaacaacaacaaaaaaatacaaccatgcaaaatgagcagattttaaaaacagtacagcataacaactatttacatagccatctcattgtatgagttattataagtaatctagagatggtttaaagtgtgtggtaggatgtgcataggttatatgcaaatacgacaccattttatatgaaggacttgagcatctgtggattctggtgtcctctgaggggttctggaaccagtccccatggatatggagggacgactgtattgtcaggatgttaccttctctcccagcttctcccagcaccttgtttgaactgccaccattttttttttttttgagacggagtctcaccctattgcccaggctggagtgcagtggcgcaatctccactcactgcaagctccgcctcccgggttcacaccattctcctgcctcagcctcccgagtagctgggactacaggcgcgtgccaccacgcccagctaatttttttgtatttttagtagagacagggtttcactgtgtagccaggatggtcacgatctcctgacctcgtgatccgcccgcctcggcctcccaaagtgttgagattacaggcgtgagccactgcacccggcctttttttttttttttaagctagagatgggatctcactatgttgcccaggctggtctcaaactcctgtgctcaagcattcctcttatcttggcctcccaaggtgctgggattacattcatgagccattgcacccagctgtgccattatcttttacctgaattattgcagtagtctcttgcccagtcacttgcttctgttttgtcccctagagtttattctcagcagcatgaactgtcttccttttaaacgagaagccagatcatgttcttcatttgttcaaagtgggctcccatgccagtctgaataaaaaacagagacctttacccctgaggcttattatgtgacaccacctccctgtctctgcctccttgctcttcttcaaacacacctggcatgtacccacctcagagtctttgctctgactgtgccttcttaccaaccccaacctgcaaaccatttgttccctagcacaagtacactggagggcaccacgaggcccatgaaagctcacacacgaaaaccgtaccccaaattcttgctccatgtttgaaatcctgaccacatcgccctgtttgtttattcttcatttgcggattaatgtgaatatcataaagattctgcaggatccaacttcctagcattctgcgtgcttcgccccagcttctttgcagacaagagcttttaggcagagtggaagtccctggctattttcatcggattgcctggagattcgtttccagcaaaagtattatgaagctccccaagcaagtatgtggtttgactgtcagtccgtgaaaatgtgagctcattgatttctttctcttgtaaaaccagtactagttttgtggtcctgtcagttctggaaaattctctgtgttggcttattttgctgatgacccaggcattgtcatgtgcctctcatcctagtgaaaatgagtggcataaatgagaaagacaatgaaaaacaaatccagaatacggaacattctagaagacagccgacctgagtttttcaagaatgtaaatgttgtggaagaccaaaaaagagggggacgaaggtagaggggtactgtttctagataattgaaacaaagtgacatgacagttgtcagcctggattgatcttagattgagggggaaaagtagccttaaaggacatttttctgcaaactgaagacatttgcatatggattgtgattgagtaatataattgaggtcaatattacgtttcttttttttttttttttttaagagatgggatcttgctgtgttacccaggctggagtgcagtattgcaacctgaaactcctgggctgaagtgatcatcccaccttagcctcttgactagctgggactacagatgtgcaccaccacacctggctgattttttttttttttttttttttttttaagatgaggtttcgctgtgttgcccaggctggtcttgaacccctgggctcaagcagtcctacttcagcctcctaagtagctgggactacaggcagaacccctggcctggctaatattatctttcttgagtgtgataatgccattgtggttctgtgggagtatgttcttgttcttaggaagtatgggctgaagtgtgtaggggtaaagtgtctgatgcctataatgttggactgattcagaagataaaactgtgtgtgtgtgcgggtataatgagagagcagacaaatgcagcccactgtcaacaagtgatgaatcaaggtgaagggtacatgtttgtctgttacactgttgtttctttttgagacgggatctcgttctgtcccccaggctagagtgcagtggcacagtcttggctcactgcagcctcgaactcctggcctcaagcgatcctcccacctcagcctgtagtatctgggactactggcacgtgccaccatgcctgcctatttttttattttttgtggagatggggtctctctatgttgcccaggctggtctccaactcctggcctcaagtgatcctcctgcttcggcttcccaatgtactgggattacaggtgtgagctaccacagctggcctattctattctttaaacttttatgagaatttgaaaatcttcaaaataaaaaggaagggacgagagagagagagataatccagtccttgaaaatccaacatttaatagatggggagtataatgtttaggaactggagccccagatttagaaaagcctgggttttaactcctgctgtgtgaccttggacaaattagttaacctctctgagcctttcttcctcatctgtaaagtgggtctaatagtgcctacctcaggactgttctgttgattaaaagagaaaagtccatcagaaatactcagcatcacactaagtgtacacaagtgtttgtgatagaaacagtcattacaattcttcctcttgactgcatattgggcactgaaatatgtctgttctctttggagggttctttgtaggaatcctaacaaagcacagcctcgtgactgcttctgtccaggggacacattgaaaagcagaggaggtaacacaggcttgttaactagataataaggttcttggaaagatgactttcaggaaagtgggtgccgtctgattgaagagctgaaaccacaggatggggtgggaacttgaatcagacccagatggctccttgggggcaatttagttcaagcatccaggcatgggccctggagaagcggtttgcttagtgctgactctgaagtggactaatgttaacatgaaacccaagaggcaagtatgtacatggcattcaaagagttggattgcaaggcgagtgtggttttgtggcactttggcctgttctctgcccccacccccggggtcccgtgtttttgtctttaaaggaagcacagtcctcagtcctcatggggtcgctccacaggtagacatttaatggagcagctgctcatcacccgacctgctgacttggaatcactcccaaccctcctccaacctcacgatcgggggatcatcagctccctggactccacagctctgccccatccctggtctggcctctccacacctctcccctgcccagtatctcccccattctaccccagcccatggccttgcgccacgctgcttcatccatcctgatgcccagtatgtaaaaggcgcctaacccgccatcatgtccctgcttgtaaactctcagatcctcgcagtgcagcggcccaagctacccacgacactcctcttctgccatatgtcttgctgcatctgcccacacagtgcccaggctgctcacaggctcctggacacagcctgcctgcccttgtcgcccctgcctggatggccctcccagcctccttcctcctgctccacgtgccttgtgcacatttcagacgtgcgcttaccgctctgtatatccctagggcctggcacagggcctggcacatagtagacactcaaggcttcttggattgaactgattaaagctttagcagtcactgtaattattcataaacactgaaggactttcattaacatagaaatagcatttccaaatctcatcttgagtaatttcaggcagttggattgtgagttagaaaaatgatgtttgttcatcattaacatacatttgaatagtcaggttcccactgcagacttttgtccccctctaatgacatataccaagtatcttaaacccatcttggcattttctaaaaatgtagattgttttgatttcaacgtttgagctaccccaaattatttaacctctctaagggctaaaatgcttcctcttttcttctcttttttttcttttttctttttccttaccccactttgaggcaggcaccctgaacttgacagattgggaaaaaaatcaagtttcagttaaaccaccaattctctaaggaaatggaaaacatggaattcacaatgtttcccctctctatgaattaaacttcttccctgtgtacttgatgaataatgttgctggccacttttcagaaatgaagtagaaatatggagaaatgaaatttgtatcctataaactgactggaaatgggattgtaatagagctgtcagttttgttcaagtggaaaatttttaagtaaatccaattgcagtattatttggttcttttaaaggagagggtgatgtagctgtttcctgtgtattgattatttgattggtacctgtctgctggacctatttttttttcctcagtggcattcattgatgtggtttaatgtatattcctgtaatctttccctgttttataaacttacaatcataattgagccacattagagagacatgttctgctgagatcacaaggtcacctaatgactgtgccctcttttgttgttgatgtattgaagtggctctaggacagttcttctgaaaaacacacacacacaaattattcttttttcctttacaaagcaggatttctagattcaattctatgcattagagaaatgaggcatttgagtagtggagactgtttgagctttttttgcctattaaaattattgtttttaagccaggcacagtggatcatgcctataatcccagcactttgggaggctgaggtgggaggattgcttgagcccaggagttggagaccagcctgggcagcatagtgagaccctgtctctacaaaaatttttttaaaaattagcagtgagtaatgattgcaccactgcactccggcctgggcaatcgagcaagaccctatctcaagaaaaaatatctatattgtttctgctgaaggcactctacagttgaaatactttttcaaaataccagtccttcccacacatttggaaatgggaccatggttttgatttctcacaaaggaagggacttagtggcttagatttgctcaaaaagcagtaacttccgaggcacatcaacccttgggatgtggacagcttctgggtgcagctgcaccagagggcttccagggaggggcaggggtcctgctggcggttgagtcccagcccagcactgtgaccttggatatgtctgtgtgtgtgtgtgtgtgtgtgtgtgtgtgtgtctgtgtgtgtgtgtgtatgtgtgtgtgtgtgtgtgtgtgttttgagacatggtgtcactttgttgctttggctggagtgcgtggcataatcatagctctctgcaaccttgaaccccgggggctcaagggctcctcccaccttagcctctagagtagctgggaccacaggcatgtgctaccatgtccagctaatttttaaatgttttatagagatggagtcttgctatgttgccctggctggtctcaaactcctgggctcaagcggtcctcttgcctcagcctcccaaagtgctgggattacaggtgtgagcccctgcgcctggccttggcatgttttttgaccagggggaggatgaggtgcttgggaggatgagatgtcaggaggatgagacgctgcctatcagtgtttagcactgtgcctggcgtcttgatagagcccagttgacgagggctggcaaagaagctggtttttgggtttctcatccaaaccccactactcctctgtcaagaaatgatcactctagttattcagccaaaccttggaatatccttgtttcttctcatccctgtgaccaagctcttagcaaatcctgccagcttaagcatcacatagatagagaacccagctccgtctcactgcctttagctcccctgcagctggtggggattctagaaaactgggactagggggtcagcttcctcctctgccctttccacaccaacagccagtagaatccttttaaatagacgtcagacccttcagtggtcctggcttcccattgtggtgtcagctcactgtgccatgtgtgccccccatctgctcctcactgtgctagcccagtcatacggagctcaagagatttcccccttgggccaccggcttcagggtgccccaaaacccccactctgccccacagggctgccaaagccagcctccttgacaacatctggctgacggggaggggagggcagtaagagccgccacagaaaacaggaattcatggggggagtggggttgaggattaacgttgagtttcaagacatccctcgctccagcccactctgtgagctgtctggggctccgcctacacacagctcctcaccctgaagctgctgggttcccctgcatcacacgcccaccttccccagtgaacccagccaccagatttgacacaggatccggtgattgctcaggcctcaggaggggagggttgccttctggccctgatatctgatcaaccacagaacacccaaaacaaatctctgaaccagtgacagacagcgcgacctttaaggaaggtgtaagtcaggagaaggccatctctcctatacatcacctctcccagcccaggaagctggcctgccaattgccccagagtctggcccagccactgaccaggtccaccctgccctcagccaatgcacactctccagcccaccccagggcctgctggggagatcaggaatcgaagaatggagcagcacttcctcccaccctcttgtaggagggagatgggttctattcagattaggcagaaacgctgaaaagtattgtgaccttgaatcctaaatccccgttaaagttgaggcttaggaagcacctgaaatcacaaggactgatcattagaatctatttaaaaacaaagagcagggccgggcacagtggcttaggcctgtaatcccaggactttgggaggctgaggcgggaggatcacttgagcctaggagttcaagaccagccgaggcaacatggagagaccttttctctactaaaaaggtcgggcgtggtggctcattcctgtaatcccagcactttgggaggctgaggcgagcggattgcctgaagtcaggagttggagaccaatctgattgacatggtgaaaccctgtctctcctaaaaatacaaaaaaattagccggatgtggtggcatgcgcctgtaatcccagttacaccggagactgaggcaggggaattgcttgaaccagggaggtggaggttacagtgagccaagattgtgccactgcactccagcctgggtgacagagtgagactctgtctcaaaaaaaaaaaaaaaaaagaaagaaaagaaaaaacattagccaggcgtagtggcgtgtgcctgtagtttcagctacttgggaggttgaggcgggaggatcacttgaaacctggggagattgaggctgtagtgagctgtgatcgagccactgcacttcagcctaggggacaacgtgagaccctgtcaaaaacaaaaagagcaaaatcctgatttaagacttaagaactctggtggagggtgtgaggggtctctgtattgctggtgaccagcacaatgcgtggtgctgcaggcggcctggacagatttttcaaatgaatgtcaaatgttgttcatacttctaaacttttaagaaatgtacagaatatggctaggcgcggtggctcatgccggtaatcccagcactttgggaggctgaggcaggcggatcacttgaggctaggagttatgactagcctggccaacatggtgaaactccatctctacaaaaaaaaacgtgtgtgtgtgtgtgtgtgtgtgtgtgtgtgtgtgtgtgtgtgtgtttagagaaatgtacagaatactgagcttgggacatgtaaaagcataaattttcatttttactttgacctgcctgaaaatagaagtgaaaatgtgtttgccacaggggaaccgctctaggggcatctgatttgctcctaggccaggccaggacagagctgtgaccaagcgtgagggtgggtggtgcgaaggcctgtggtttctggcccagcaggactttgaaaacaatctgtacccagacctcactccagaaggttctgagtcactggctccggggtggggccctgacatctatattttcaaatgctccctaaaggattccattgcatagccagtgttgagaaccatgggattagacagagtgaggaatgttctggaactcagcactcagtgtctgctttgctgctttccatgaattctagttccctctaggaactctccttgcccacctgctaatcagccagaggccatcaggaaggctggctttggtagcatggtacagcagtcacatctctctaagttccaaagtcagtttctcaggtggaaaccacctgccgtcccagtcaccctcacagatccctcatgggtgaatgacatttctcaatgaggagtgggtccggcacagccagtctgaactgcagggctgcagtagaccccgtcgttgagcaggttttagaggaagaggttggccatgtcagatgaaatcctggtttctttaccagggagaatcatgctgggcactttgaggggcgctcaagggataggcaggaagagccaagcccatgagggaggcagattcccatctgcccctaaggttccctcatgggtctggcagcccgagaggcctgtggtatttaagctgtttacgcttctctccctctcctctccactttcctgcatccgtgtagttgagtttgtggaagttaagcttgcatacagtgtgcctctacctgacttgaagacaaatcacttgccctctcgagccttgggcacctgtcttgagaggaagggcctgcgtaataggttgggcctcctggatgctccccagccctgcagccctgcagccccacacacagctacatgtgtgctcagaaggtagctgaacccattctgtgcttggccttgtgtataatcacttgcatgggctaggcaggagattcccttgcagaacttgaaactccctgcagcactgaaactccagccatccctatctcttgtggttgttctgaaccagtgccagtcttggaaatggcctgttttgtttcaggcagtcataaaaatgccttaggagtagagactgtccaggccagagtcagccagccagaccatggaggctcagaagttgttggggctgagctggcctcccccagtcctcacaactttttagtcatttgctaataattaagagccaaaagttctcatcccatcttccctccagcctttggactgactgggatgccaccattttttatacaaggttcaaggtgagatagactttctttccttttccttccaaattctcatgtagaaaagccgcatgcaacttcctggtttttcaacttggcacatccacattatctttttgcatttatcttttttttactacctataccctggcctttgaattttataatacactttgcatttttctaaatgcagttggggttttccagagctgtgcaaagccaggaaatatgcatgtcatttaaatgactccggttaacctttagcctttaactggtttctcataaaactcgactctctcccagctatggtttgcattcttcagagcagcaaaactgatgaacatctacagctttcactgttccctgctgggcccccttccctttgctgcctccagtctgatgagccatgctggcagactctgggaaatgtgagtcccaagcagtgtctagcagaaggttccagactagattgatgcagcccctgttgccacttcctgaggtctcccagggcccctggcttcagcggcttcccttcctatcatggcatcttgttcctatcatagcacagtaaccataatagatcccatctgtttcccaccagaaacacaagatccagactgcagattgcacacttgactgtagacagggactctgagtgtttcctcacccactcccgtgcgcgtccatccatcatttgctgaatggtaggcactgtgctagccaccagaaacacaaggacaggacagagccctcctcccttcaggcatctagcacagtgatgcacttcagcaggtgggtgcaggtgctctgctggaaactgcaggatcaagaagaatacagagtagttgggcccttgctgggggtgggtgggtaaacagggacaagaattgcttctgggcgtccgagcctttgagccaagggttgttctgagccagtgtgaagcagcagacaacctggggaagggccttccaggcagagggggcatctgcagtgaagacacacaggtatgtttggctaccaggtcagtagcccgtgtctggaacattgggcggtccattcgtttcatatggctgctgctacacatttctacaacacccagttattctcttacagctctggaggttagaagtctgccacgggtctcactgggctaaagtctaggtgttggtccttcccgaaatctctggggagaatctgttttcttgccttttctggattctaaaggtcgcctgtgctttggcttatggcccctccctccattctcaaagccagcagtggcaggatgagtccttctcacactgcatcactctcacctcctcgtctgcctcactctttcacttttagaaccccttctgattagattgggcctgtccaggtaatccaagataagctcccccagctcaggctctttgattcagtcacacccatgaaatcccttttgtaaggtagcatgttcacaggttccagggattaggtcgtgggcatctttgggggctattacagcccaccccaggtgggatgcagaaactggcagcagatggggctggaagggtaggcagaggctctgcgggacacgctgcaattgaggaagcctggagaactaagcagatgaacaggcaggcaggagacagctacccctcaaatgctcttcagttgtatggcctgggccccacctcctgccctgtccttggcagatccctctgaccttgcagccccggtgcagggtggaggcatgcccagtgggcccctgggtctcagaaacagcaaccttttgtccttttgtctggacaaaagagccccactttgttggtacaagttaaaattcttccctcagccccctctccactctactcccatctctagggtgcccctggtctgagcccgctgatgttcccaggttgcctcctctgtcctgggcacccagccacatcctgcccttcttgcccgtcttctccattcacccatgtccttgttgctgtggcgcctccaggtagggctcctccaggtagccctggctcacgtctccccaagctctcctttcctttttgcactaaaaggctcaaaaatcctcctccatggccatctgacccttccactcccctccccacctagtcacaaggtacccactccctggattcctcaagccatagggccctatcatttcttacaggacagcagttccaagccaggagagcataggggttctctccagccaatttgagccaggaggaattttaaccaaaagcccaagttggcttttgaaagaggcctttctccaggaaaggattagagagttccagtcattaaatggtccgctgcagaacgctagttcttgactaaagtggttggtttttaaatgaaatgaaataaatgtgcctttttgttttttcaataaatgagaacaaaagtagccaggtgtggtggcatgcacctgtagtcccagctacttgggaggttgaggtgggaggatcgcttgagcttgggaggcagaggttgcagtgagccaagatggcactactgcactccagcctgggcgacagagtgagaatccgtctaaaaaaaagaagaatattgtcgactgtgatgggaaaacattctgattcaggcctcaagtatatgtatgagaattgaagttctgtgaaggttcgtgcatgtctcccttgattttgatggctcttgttaaaaaacaaacccaaaataaccttagaaactgtgtgcacacgtgagtgtgtgcatgtgtgtatgtacacctgtacacgtgggaaatcgcgacggcgtgctctgtacaagtgcagatctgctcgtggacagtttctcacccctgcagggccagggccctagggctcccaggtggctgccacttccccattgaggctgttccttgccagaagacctagggtccggtctttcaattctcttcctgctgtgaggaaagtgtttctcttgaaaacaggagccagcccaccccaaatcttgatgctgggtgacaccaaagacaggaactcttttgggttaaaatttggggctacaggtaagacttgatgaggcttctatcccagtgggtttactggtgaattgggaatgagtggtgtgtaaaggcagccggagcggctgtgcattcgttcagcagccgtttatggaggccctgctgcatcctgggccagctcagccctggcgatcaagctaagctggtgctccctctcctccacctctctcttctggaaggaaaggaacgctttcttcctttaaggcctaagactcacagctggcttgaggtagaagtcctgcctgccctgaatataaaattttaaaacttccatatttggcaaatctgtaccctagttttgtttagttgtgtgtgggcgtggggttatattcagcactggaaattgtgggagcccagctgtgcatcaacagcttctccatccagttagggagagtgggagctccccatctaagtttaaggttgcagctcttcctcccatagatctgtggtttaccctcagccccagcccctgcaacaacactgacccctggagagcccagacaaaggctctgagaagtcctgcagacacacagccagccaaggaggtttgcttagtaagagctgcccctcatcagcagctcaccatgtagggggattgaggttttgtttgttttgttgttgttgttgttgtttgtttgtttgtttgttgttgtttgaggcagggtcttgccctgttgcccaggctggagtgcagtggcacaaacgtggctcactacagcatcaaactcctgggctcaagcaatcctcccacctcagcttgccaagtagctgggcctataggtggacaccaccacgcctggataatttttttgattttttgtagagacagtattttgccattttgcccaggctagtcttaaactcctgggctcaagctatccttccacctggcctcccaaagtgctaggattactggagggagccactgtgcctggccaaggcagctcatcatgtgccaggcactgaggatttaagtgtggaggccccatgtgggaggggcccaggtagcacctgaccccagggccactcagctccagagccctcggtctcctccgaagcttcacctcctctcactccatcctagcatcacccaaccatttttctttccttcctaagcccatgtaataatatctgccagtttcctccaacactgatttgggctaaaggagcccagaataaacaggtggccctggccctaagccccagtcctctcctgaactggggcaagccctccacttccagcctcctgctgcctgtggcgctcccctgtccgctgggaggcagggaggctggcccagggggacctgacatgaagagtctgtcttacagggctcaaggggatggctgtggtctccccttgcctgtgtgtgttctacccggaatggaaaccagcttttcaccttgtccaggaggttggggacctgagggaacacagcactgcttctgtcccagccccccattgctggttttctctccaccagcagagtccaagcccaagccgtatgggccccagcaggaccacactgagccctctctccagccccgcggcctggctctgggatgtacccataccaccccttttagtcccctgcttgctgagtgtgtccccttcagctctgggccttcatacaggcccatccctctgcttgggatgcttattcctgccaccatggtcccctgtgtttgggcaactccctgacaccttcaactctgcagacagcttacttcctagcaaaatcttccctgaccaccagatctctctctgttcatggcatttcccactgtgtgtgattttctatttttatgtggttctttggttcatgtgggtaccaagctgcttgggggcagaaaccccaattcttgttcaaagttggatcccagggcccacagtgtagcaggtactcagtgaagacaggccagatatgaatgaatggaaatgcgagtgggttagggtccgagcccacaaatgaggacattggccttgttttccaaaaatagaccatgactccagggccctagaggaagcctgtaaacctcctggtctgacagacatctgacacactttgcgtgggtctctttctccacagagaagttggaataagatcaagacttaattcgcaggcccagcattagtcttctgaactcgccggctatatgagtcatctccactgtggagggaggcaattttaaactggaaaggtcaatcgacatgtcagaatatctagtaaatcattcgcgttccacctggtgccccttccattcccctgaaaaagcctgcccttgttcagcgcctctcgaagacactgtggagaaagaggtagccggggctgggtggtgatttacctcgaggaaaattaatatggtgccatcaattctgaaggcagaaagggcccatggccagaaggctgcacgcaggctggaataactcacggcccatgagggccctgagtttggggaggcctctccttggccctggatataaatcagcagcccttttgcagagagagagtcggagttttgtcaggcctgggggaagggagccagcaccagaagcccctcttccccaggagcctgtcgttgtctgaagggttgaaaggcacctctgtgccacccttctcggccagcaccaagcactggactcatttacagacgaggccatgaagcccccaccctgggttccaggaggatcacgggaagggggctttcagcctggctgtcagagaagaatgtgacaggcccattttcactccacaggccttaattggatggtcagagggcacatctgtggcttataagaaacagatggcgggatgggttagtgaaggagaaagcacgcttgcttcaggttgagtgcccgtggaggtgctggggcagcacgctggcaagcaggcagactcggccaagacccagctttgtcacgtgcgtgaggccttggctgtcctcttcatctttctgcgtgtctgtttcttcagctgtaaaatggagatgatgaggcccaacaacataacataggaggatttggtgagaaaatgcatttgaaatggctgaagacagtgccgtgtgttataagtgcttggtagttgttattgtcctgtggtagccttgggtctctagagccaagaacagcctcctgtctggatctgagtggcttcatcccactgtgtgggactctggtcccaagtgttgtatgtgagtagctgggaccacaggtgtgcgccaccacacccagctcatttttgtattttttgtagagaaagggtttcatcttgttgcccaggctagtctcaaacccctgggcttaagtgaccctcccacctcagccttccagagagctgggattacaggcgtgagccactgtgcctggccgggaatcccatttcaacctgagattgggcggggacaaacatccaaaccatatcagtacctgtgggaagtgacttggaggcctctcgggtcttcagctagtcctctgggcagtagggagaatcctaagtaatagccgcttcacagggagtcagtgaggatgaagtgtgtggagcgcagagccactgtttgttgaaagtgcattgttactgttattgcctttgttttggtagttaggcttgtttccagggaactttggcttccttggcttctggggtgtgcacacaagcactggaccaaggatgaggctcaaggagggccctgggctcatgccctgggctgacagtggaggccatggggctggtggggaggagcacaggcctgaggccaccccacctggctcaagatccccactcgctacctctgtgacctggacaaattcctccacctcatctgtaaagtggggctaggaactgtttcccccttactgtgggattattatgaggattcagtgatgcgatccatgttgttttaacagtgctttgctatatggtaaggcttcggatagtacctcactggtaggtaatttcctgttaaggacagccaaagtggaattcagatggggatggtgagagccgagacattattttgtttgtttgtttgtttgttttgagacggagttttgctcttgttgcccaggctggagtgcagtgtcgctatctctgctcactgcaacctccgcctcccaggttcaagcgattctcctgcctcagcctcccaagtggctgggaatacaggcgcctgccaccatgcctggctaatttttatatttttagtagagatggtgtttcaccatgttgtccaggctggtctcaaactcctgaccccaggtgattgagagccgagacatttatgcccagttcctgcctttccagagcctggtgtcatcttttaagtcagcgctaccccatctccttcaattcagttcatgtcacctcagctcgacagaggcagttctgtgtctgggcaccaggaatcctcagggggaggccctccagcaccacctgagatgtttgccgtgtcagagaaccaaccttgtgatcacttacttagtaattttctttgaatgtactcacaatttatccctgtcagggcaagatggagtaagttaagctagtccaaacctaaacccgtgaaatcaggagatccataaactaaatatgtattttctcacaacatctgaagctaaatagaggttgagataaaattagaaaccattcacgtaggtgccatctaaaaccatcttaggtccctgtccccacccccatcccccacctgctgccccctatagtctgcacacaaggtggacttgttaaggctcccctgggacccctgcctgcccacagagcctcacctggacccggtcccaagagccaggcccactctcacgtccaggaggaagccctgcctccccaggtgttaggctggacttttcgtcatacagcacagggagagtgaagcagttaacaaaccacatttaatatgcagtattgtaattttaaatttgtggaacaaacctaaactactacttgtttttttatgctacctatagatattaaatgtggacagattttgcttggcagaccattggtttagaaggctgggttaagccctgtgtttgagtaaaagtagtattcaagtaaaagtgggattcaaccccaggttctttttggcctcaggcaaggaagttctatatctgcctcaccaacacttcttccaggagggtggagaatcagatatgaattatttctcacaatcaccaggaatggctgcagctctgctggacagattctgcatctgttcccaagctcatcggtcagcttttacatgggtacaccgaggcccagagaggaggacggggcttgcccaggtcgctggccaggtcactgtgctgcttccacacaaggtggctgggaggggaggcctacccagtttgaggcaggaagtgtctgagaagctggtcagagctcccccgctgtgcagccgccctgggctcctccacctgggagctcttgggacaagtctgagagcctttgaagcctctgcagcctgagagtttcagagctcttgctaccttcagatcctctttccatacagaacaccctgttagagctttctctcagctgggggctctctgtctcgaaaggggcctctgtgctgacagccccagtccctcagtgcggatcacacatgtggccttgccctgtgccaggtgcttgactgggcccttgctgaatcagatgaaagaaatcctctggaatcctcctgcacttctgcagcagctaacaactttgtttcatgcttttgaggccagaggctctgagaggtcacatgaccagcccaagcatccacagctaggactccacagaaccagctcatccttgccaggtgggaggcagtctgtcccacaccagggtatctgaaatgtttctgcttcaggtgctgtggctgatgcttccgggccattatctgtgtaccatcttcagctgggtgtgggtgaaagcctcgttggggatgggcccagaaagaccttggtgtatttctcacacccaaagaaggccgccaaggaaggcccatggcgacccctgggtaggaagcttggtgctctcagggagtgggatttgtgccatctggtgcacagcctcgggcaggaagtgcaccaggcccccagccacgcgcggagagcttctccagagagggctgtgatgtgcggctagaggcagtgcttggcacccctgctcctttcacaggacccagaagtttgccagatcaaaaccttagcattggctggaaaattggcttacttattgccatctgtacccatcacttacccatggagtgggcgccgtcctgggctgagtcgggtgggggtcctgccgttgagttagtaatttcgggttttccttttgttgtttaaaggcatacttgttaggctaccaagtaatatagaaacatattcacattgtaaaaggctcaaacagtgcagtttgtagagtaaaaagtgaaagtgccctgccatttccccagccacccacagtaccccctttccccccaggccacctgcttctccagcaggaactcccagcctccgttcaggggagggggagggtgtccttctggaccaagctcttcgcacctgcacacatacgtattcctctgggtggatagcctcgggctgtcttgttcaccacggtcactccagcccagccacaggcctggcacttagtagacacccactaaatttttactaaatgaatgacagtagcagtagtttttacatgaatgggaccatggacatcttgttctgcacttggttttggcactttaaagtggggttttcctgcgtcgggacatcagggtatgagggtgggcttatctgccgtcattgcattaaatggaagcacccgagggaccatcccttgtgcatcacccttgttgatatgcattggctgtgtccaattgtccatgttacagaacgctgaggggtcagccttttagcaactcagttcacaaacacagcactttgtcaggaggcagtcctagctgtgaaattgctcaaattgccctccataaaagaagctgcccatcaaacctcctgccaacagcgcagggaaatgcctgttcctcccctctgtcccacactggcccctgttggtctttgtcatctgtgccagcatgacgagcagaagcttacccatctgctgagcatgtccacctggtcgcctggtcacctggtcagaagtggctatgggaattcttcccatatatcccaggtggccagggaagggcccgactcaggaaatggcatctgtaagaatgatagggcagcctactgaggggtgctgggcatgactcgcagcatgggctggcccacccagccaccgccaggcaccggtccaaaccagtcaaccctgtgctctgctccgttttttccatccctgcctttgctcatcaatgaggtgccagaaaaggcttccagcggttggaattcctgcctccttcatgtgtgtttggaggccacacagctgtgttctctcaaacctccaccatcctttacactcagaatatctgtttagacattcctaactctgcttggtcgttgtttattttaaaatagtcccagaaatacgcttgcttatttagttctccaccaaacactccattgcgtagaatcatgcgtcccctgcattctggttccctggaagaaccgcagaagggggacctgcctcatacgaccaggctgcgtcagtcatgggagtgagctgtcagacattcacttttttaaaaaatagaaacagggactcgctatgttgcccagtctggtctcgaactctggacctcaagtgtggtcagaatttcactttgaaattcttgggttgaagaagagcttaagaatgggctgttactttcctgtgtttgtggattcatggaatgattcttaggggccattgtcaggaaagggaccatggacaacccagctggagttcttccataccagatgtcctcaggcagcggagtgatgttgatggctgtctgcagcattgccggggagcctgtgtgtgaagccttcacagtggaccactttcctattacatttctccgcaactccccgcttacctaacatcctgcctggaggtccagagaatctacagtccagtgttttaggaggctctctggatttttgtttctattttattttatttagttagtttttgagagagagtctcgctctgttgttcaggctggagtgcagtggtgtgatcttggctcactgcaacctctccctccctggttcaagtgattctcctgcctcagcctcccaagtagctgggattacaggcatgcgctaccatacccagctaatttttttttttttttttttttttttttggtatttttagtagagagagggtttcttgccttgttggccaggctcgtcttgaactcctgacctcaagtaatccacccgcctcagcctcccaaagtgctgggattacaggcatgagccacggtgcccagcctattttaattttttgagatgaggtctcactacgttgcccaggctagtcttaaacttctgggctcaagcaccccgcccaccttggcctcccaaggtgttgggattacaggcgtgagccaccaagcctagccaggattttgcctttaaagcgcctaatctcctttctccataaagacgtgaggtaagcagttttccctcctgtgtttatatctcccccaactcacaccatgagctgcttctattaaaagacacaggagatggataactggtgttgaaaatgatatcacttatttcaaagggtaaaagggaagttgtgtgtggctttcagtaaaagctcacaggcctattcagtatcggccacttgatgaagaagccttactttgtggtggatgcccccgggtctggccccagtggcgcctgagaggcagcaggtagaggcaagagcatgctctgaaggctgtgattcacctcgtagggcgggtggggctgtgtgccctggcagccttctgcacctactgagtctcaggcctcccccacctctgcagggctgtcctgaggggctggcactgcacagggaagggcgctggctcggagatgggtagagttagtgggtaaatgggtactccgcagagtctgaccgccagcattcaagctacctctgctgcttgccaaccaggtgacctcagcacatggcttaacctgagcctcaggtttccttcatctgaaaaatgaggaaaattgtcaggaaagctttgagcacgatgcctgaaacacagcaggcctctgataggtgtaagctcaagttccatgactcaggctgcagatgatctgctaggctttctggtaacccacgggtagctgaacttgatgcctgagctccccctcgtaagttaccccacttttctttgcaggaaaggtgtgcttaagtaacaggtactcagcaggggtgttctgacaccctgggactgccatgggtttgcttcctcagaaggcttccccgtcggctgccctctctcactgtagggtctgcttggactcagtgtgcagaagccctccattatcgacagaaaacaagctccttaaaaacacacttaggccaagcacagtggctcacgcctgtaatttatccagcactttgggaggcaggtggacagatcacttgaggtcaggagttcgagaccagcctgggcaacatggcaaaactccatctctacaaaaacgaaaaactagccacgtgtggtggtatgcacctgtagtccaagctgcttgggaagctgaggtgggaggatcgcttgagcccagcaggtcaagactgaagtgagccaagatcacaccactgcactccagtctgggcgatagagtaagacctgtctcaaaaaacaaacaaaaacaaacacacacacacacacacacacacacacacacacacacacacatgccaggtgtggtggtgggagcctgtagtcccagctacttgggaggctgaggcgggaggatcacagcctcccgggaggttcccgtgagccaagatcataccactgcactccagcctggctctgtctcaaaaacaaaaacacacacaaacacaaaaaagcccatgcttaaaccaatccctggcttgcaggcatttccagcatttccttgaacgtttttgcaaatacagatttgaacataactgatttcagttcctgtccccaaaacttttggttccttccttccttttgttcgtggcacaatggtgagagtaggtgctctggagtcagaatctatcagggtttgaggactgggtctgtcgtctatgagctgtatgacttcggccgagcttctgaaactctgtgggcctcggtttcctcttctataaaacacggtggtcgtgacaattaaatatactaacaagcgtttgatccataatagaatccccaatgcatggtgactgtcgttatcctcatcatcatgactgtccccagtctagtgggagacaggccaggaggcaggaagctccccctaccccagtgtcgaggcccccatggagcagggaggagctgggatgaggagcatccttacctgggcaatctgtccagacccatctcagggatctcctcctcctgtaccccccaccacctccacttccctgctggctcctacagcctttgcacccccttctcatggtgcttttggggcatcacatggtgtgcaccctcatctcttatgaattcagctagacctgctcagcacagcagagtgagagagagaagggcagtaggcttcactggagtggcccttccctgccatccctcacagtgagcctgggccctggagttgggacatttggagaacaaagccacttttcctcagccagtgcggttaccgtggccatactcgtcccagtgagtatgagtctaggactcaaaaagtgcttcaaggcctcctaaaccctagctgacacttcctgtggcactcaggcaaaggaacaaacaggcttccagtgtacaggccgggagcatgccctgctggacacttcagtgattctgcccggactcaagggttggaaggtgggcagtgactggtcacctttctcttcatatctataccgcctggcactgaggagtcaccaaatgaatctgtcttaaagcaaagtgggcgtatttttgaagaagtaaatatcagccaggcgccgagggtgggcagatgcaccctgggcacagcacaggtggaagagggcagggcgtgtacaagactgagcaagaggaggtagaaggcgagccaggatatgagggtgtggcagtgcagagaaggggccctgctgaaggacaggaaagtgggctgggagcagctccaggaagcccacttccatggcacagttagcagggatgaggtagcaagaatggaggcggcagctggtgaaacatgcctctctcattcaccccaggtgagaggacagtgacccaagccacggtgcattcagggatggggcaggcttggttagaagggaggacccacaggcttcctagcctgttggggtggaggggtgacgagggcctttggacgacaggcaggtcctatcatgtgcttgtagaagccatggtggttaatttctgccttcttttgtaactgtggcattaggaagcaggactgaccccattcctctaaatcatgccctggtctcaacctttcctccagagtacttcctcttttgtacagggccccttcccagcctgtggctgtcctaatgaaccaccttgctgtgtcaccttcaggtgaccaaagatgaaggctccaggggctcaaaggggaaactgaagggtaacatgagtcaggggttccagaggcttgactcagaagctctgcgcctgtcctgggcaggccgagcctgataagtttccagccctaaggtgtgattgcagtaaaccttctggaagccagagccggcttcatctacagatgtgaggtttgtgggaggaggcagaagtgctcttgtggcttaacgggccctcttggctccagctgctcagaggaggggcagctgagagccacacaaggccttgcctctgaagtttgaagcatttacaggcaccacctccccccctacaactttttccaggccacatcaggcaagctcctttcttaagaactgaccttgtgtgtctctttttgcatctgagttctttagaaaaatctctcccttttttcctgtggggccctgcatgcctgccttggccccactgcccgaatatgccttctctcatttccctcctgcctctgccgtgtagtttctaatgtagctcaaatgtgaaaaattaggtttgcatggttgccatgaattttacgtgaatcacatttaaatcaataaagcctgtagaatgaatcaagttatcgttattatgaggtagcagggggctatttaaaggggctgtgggcctttaagcacataatggaaaaagtttcctactactggatgatccccgataaagcacttaaccttttgcagctctgggctccctcagtacctgtgatgcgtttgaagtttctactttcttcttagcaggtgtgatcaagcagaactagaatgaaagtcacattttccatgacttgtttcttatttgaacagttgctaatctttttttttctttttttttttaagtgggtagtcttttaaatgacattctgtttcaaatgtgtgagcttgggatctttgatgtaaatagcaggaaaaagtgggcggtaatgttatggaacgtggaaagcctgccttttctaggtcgtgcttttagagcaagaaccagagagaagaaagaaaggaaagagaagatgaaaaagaaaaaaggctgtgcaggggtcacggctggaaaggccctcatagcagcctggcacatcatgttctgactctgggtgcagggctccccccacctccccattttcaccttgatcagtcctgacattctctccacgggccagctctggtctgtgtgttgggaatgaccactccaggaacagagtccaggcagtcagcatagctgagggtttgccacagtgctctggacagttgagtaagacaggagctacagccgggcacgatggctcacgcctgtaatcccaacactttgggaggccgaggcaggcagatcacctgagatcaggagttcgaaaccagcctggccaacatggtaaaaccccatctctactaaaaatacaaaaattagctgggcgtggtggcaggctcctgtaatcccagctacctgggagcctgaggcaagagaatcacttgaacccaggaggcagaggttgctatgagccgagatcgtaccgctgcactccaccctgggtgacatagcaaaactctgtctcaaaaagaaaaaaaaaaaaaaaaaaaagggagctagaagcgtagctgtagcgtaagattggcaccaaaggagaccttcactttggaagttaatggactcaaactcctgggttcaagcagtcttcccacttcagcctcccaagtagctaggactgcaggtgcacaccatcacacccagccattaccttttaattacacaaatactgtgcaaataccttgtccttgtaagaaaacaaaactaaggccagataccatggctcacgcatgtaatcccagttactttgggaggctgaggcgagggttgtgggggatcacttgagcccaggagttggagaccagactgggcaacatagcaagaccccatctctaaaaaaaaaaaaaattttatgtagctgggtgttgtggtattcatctatagtcccagctgctcaggaggctgaggtgggaggatcatttgagtccgggaagtcaagcctatagtgagctgtgatggcatcaccgcactccatcctgggtgacagagtgagaccctgtctcaaaaagtaaaataaaataaaaactaagtaatgtccaccctcctcatcccacttccctggataaccacagtcacagtgggtatgttttcttccagacctgtgtcccaagaagcacacagagacccacgggaggaatacagaccattgaaagttttctaaatttatttcctgattataaaagtattatctattcactgtagaaaattaagagaaacaagcatttaaaaaacacttgtaaccataccataccccaaagataaccacatgagttcattttacaaaaatgaggtcaccctgtgcacgctgttcgataaccttaatttttcactccaggccttatgggggtgccttgtccctgcatcaccaagctgtgtgtctcatcaagacttttccagaggtggtgcctgaggcaattcttggttggcaaatgtaggaatattttgtccatgtacgtaatcatgtcttctatgaaagatgatgctgattttgcgttgatgtaaatgaaattttccttataaatttcaatacaaagggagggacataatctaaagaaaacatcacataaacggtacaggtggtacaactaggaaaaaatccttaggatggtcaggaaatgactaaagtttaggaaccaccattttaacagcatttttaaaaaactgactgtataacatgccaccatgagggcctgccaagatttagtttcccagtatctgtgaatttttccctttttaagtcctccccaccccaagtttgaacttccctgtagctgaatctctacacccaaccatgagaacggcggtaacctaaaattctagaacaggttaaaggacatgcccagctgaaagacttctttgccaattgccaagttgccctccaggaaggctgtcccagtgtgagcagctgggtgagtaaccaggggctgttttcctgatgaaaattcacaactgtgagtaaatgcctcacatcccttaccaattttcttatctgaaagatttaatcagctccctcgcccttgacaggtttctttctctgtgttttgggggcctctgtaagtgccttttaatatttccattgtgtgtgttaatctttcattagaatttgatgcatcagaaatatttttaaaaagcttagttcaattaatttccttccctgccctattattttacttccttctttacctgaatcattaatggcaaggagcaccgacacagaactgagttcagggctgttctaattaactcccggggatgttatgagcaatccatcagtcctggggttgcattacagcctccgtatttactggtgttttttcagtgagctttccctgtgtgtgaaaaatccagcagctttttggccccattggtttacatctgttttatgaatggcctgaaacgtcttgccccagtgtctgagagtgtgatgaggaaaaggattttgtgctttgctttgtttttcaattatccatgggctgtgagttccttgcattataatagcaggagcacaaacctatgatcagactccaccaacttcagtgttggctcagggtatgaccttgggcaggtttgtctcctcagctggcccacgggcgacaggtgtagggaggtctgcctcccacaagtgatgccacaaggccaagtggtatgtagacttggctgtgtggtagaatcacttggagagctttaaggcgcccggtgcccaggtcacaccccacaccaattaaatcagactgtctgggggcaggagccagcatctgttttcagtgatcccaggtgatcctacatgcagtagagtttgggagccaccgctctagggattaaccgaggcctctgcagcacgcactagcatggtggcaaacaatgagttctcagtgcccacccctcaacagaaaagccagaagatggagacacagaagtcagatcctgctcagccccatctccaaggaacggccatgtgagcctgtgtactgagaatgcgtgcctgtgcacgccgaggatgcagaaagggacaggggaccaagtggcaggtagccttttcttctaaactgctaccaggtatttgcatcccagcctgtttagtgttgctgctgagtcccctccaccttcaagaactgtcagcctcttcagtaaggagacgtggggtcccagctgtggcttcctaagagctgagcgtgagggccttagtgtggccatccataatggtatttgggatctgacaagtctccaaaccacttgtccatagaccctccagggccctgcaccctgagaaccagcctggtggggctggagtcctaaaatctgcactttgtcccagtaccgggtgccccaggctgccaatgggcctcccttcgaggaaccctggatctctcccaagacgctgtgtgtgagcttcagcctttccagttgcctgcacattctcgcccaagtgctgtgtgtgggagtaacttttcaactccttcgttcaagagcctttcccacccctccactgggcccagtcctatgtgggggccaggacagagagatgcccaggcagtgagcaggtcagaccctgctcatcctcagaggccagggtggagggaggcaggtggcccatgaggaatcccttccagcagtgagacctgtggcaccccatgcccattgatcatacctacttgctctgtgacacggagagacagctgtgtgggaatgggctttctgtgtgctctgcagagagcgtggcggctaaggtgaggcatgggagtcataacccccaggctgagtgagccaagagccaagagtgcatgtggccagagcgccccattccttccaggtcagggagctccaaggccctgggccaggctgcttcatgccacccgggtttgccaggacaggtcattctcatgcacggctcatcggcagacgtggagcagagctgtttcccacggtcccacacagtggacagggtctcgttttcttccctctaacccttcgctgtccaacacggtagccacttgtggctgtctaaatctacattaatgaaaattaaggttaaataaaattaaacatttctgttccactgtcacaccacatttcaagtgctcagtcgtggatagcaagacaacggaaaaaggatatttaattgtatttaattttaattgaaatgcaaatagccacatgtgtggtggctctgtactagacagcatggtcgtaggacatttccatcaatgcagaaagtccttttgggcagcagcgctgtctagcaggtggggtaaaatcaggaaacaagaaaggcaagggtttggagtctttcaggatcccagctccgtcactttctagtgtgtggctgcatgctgtcaactctgctggggcccaggcgtcctcgtctggaactgaaagcccagatttgtgtggctacctcctcacccaggtgcgaggacggggcaaagtgaggatggtaacagtaacagaggtgtggactgggcacttgctctctgctttcattcttccctgcctgggacccacgtgctgttttcacccctgtttacagatgggaaagtagaggcccagagcctgtgctgtgtttaagtgtccagcatgtggcaggaagcagagacagtggggattgtgattcttacctatctagccagagttgcacctggggtttggaggcacggctgactgggtacacaggctctacacccctgccaagtgtctgaccacggtggctctgcctatgacacacttatttactattggacggcctgactagctcttttcttaacttttgcctaaaaaaaattcaatccatggcttcctagctctgaacttgcctctgtgcatcaagctgaagaaggtgcaggagtttcagagccagtcattccttaacagggaggtaagactgcgggggactcagcaatttggagcctgggctttctcaccacctatcatgccctcctacggtcctgccaaaatctcctgtctctctttcacctttccctttctccgcctgctggtggatttcctctgccaagaaattagcaagagcagctgaaggcggtgatgcacacggcccggccaaagtgaagtcacccctgctcctgctgtgaaagctgctgatctctttcttagcacaggcagccaaatgtggtttacccttctggtccagatttcactaacttagtgtggcccagagaatctttttacaagattggggtttggtttcaagcacatggagggacttggacctgactcacttgggcatttcctgcttggggtcctgggaattgacctcccggaagataacattagcagcacaacctcaagtcagttactgaccctctcagggtctcagctttctcatgtgtaatgtgcagataatggtactgcctgggctgggtggttttgagtgcttagctcagtgtcagatgcttattaaatattacactgtaactgttagtatctgaaattagcatgggtatatgtttgcaagtggctggaacttttgaagagtttatttgcagggtttgcagatgaacttttaaacaaagtctgtaacgggttgaatatacctttccattgtgctggtacagtttatactcacagatttctttcagttactgctttatggtctgtctgttgagactgtggctgcgtgagggccagaccttcattttcagccctgcagccctagtacctgggactgtgcttggcccatagtagatacacagtaactgtttgatgaattaataaataaaggaacaaatgtcatgttattttttcttaatatgcttagtaaactctttgttcgtgttatattttaagttccagtccaggtcttcattataagcttccaattaagggcctgagttacatttcactgaataatgataggcaaaaaccttcagttctcgcagtgatcttcctagtgtccccagttcctgggcaactatttatagtcctaggtgtggctttaataagccacccttgttgatgggtccccaccctccgcagcctcacccccaacagtcctcactgccctcttcctcatatcccagccccaacaaaggacaggagtttcccaaactcaccatgttccctcctgcctctggcccatggtacatgccccttccctgcatgtccttgactgtcgcactctgcgtgtcacactctgcgtgtcttgttcattctgttttctccctactgggctgtgaggtcctacagagcagggactgagccttttatcttgtctctccaacaccttggatgtccaaggtaggcatccctcctctccacagacgtctagtgagcacataccgtgtgcctggccatgagcagtgaacaaaaatgacaaaaatccttgccctcatagaactaatgttctagaagatactccataaaagtttcttgaatgaatggagctcccttttttattttgcccttcatgaatttcataagtagttcgtgtacaagttcatttttttcttttcttttcttttcttttttttttgaaacagggtatccttctgttgcccaagttggagtgcagtgatgcaattatggtcactgtagctttgacctccctaggctcaagtgatcctcccacctcagccccccgagtagctgggaccacaggtgcacaccaccacatccagataatttttgctttttttttttttttttgtagggacacggtcttgccatgttgcctaggctggtctcaaactcttgggcttgagcaatctgcctacctcagcctcccaaagtgttgggattataggtgtgagccaccgcacctagttcatttttaaaagaattaaaaactcagagggaaaaatagtttgagattctccatttttaccatggctgaaacgtagtttaaataaggccatctgattgggggtgtggtattgtattacacacagctgtgctgataagattgcgtttcacttaaatcacatgcttccagaatgttgctctgctgcccaaagtttattagtaatcagtttgaacacaaaagattaaaaacgtaaagcagggaatttggtttgtgaggtatacgcttttgtttaagtccaaaggtacagcttgtctccaccagaggtctcctatattttactgttaatgtttgaagtatattgaattcccacaagctaattaaaaatcagactgctgtgccggtaagcattcactctgtgaactaatttctgccaaacggctataaatgtgtcccctggtatgaaatttagacattctttcccatcagaaaagaggcatgtggtttagtcccaaccgcttcatttgagtgacaaggaagctgaggtccacctggaaaggtcggttgccctgactgaggccacacagcctagtaagtggccccactgggcatcagacccaggccccttctccatctcagctcagtgttctccccaccaaatcctgctggttcttgctgggtggaactcagagagctgctgttactcctaagtgccaggcactatcctagcaccttacaaacatcattgagttttcatagtaacactatagggacagtattgttaatatcacctctatttgctgatgaggtacctgagggccagaggggagacggcaacaagccgaggtcccacactggtaaggggcagagctcagtctaaagcagcaggcggcctggtcctcactgtgccttcaccacaaggctgaactgtccctggaggctgaaactcagggacagacacagagggagggcctgagagatgggcaagcgaatgctccccggaccttctggcggaaatgaggtgaagagcctcaaaccccagaggtttggtggaaaatgggaggctagtgctgggcccacaagggtcagatccaagaatatgctggggaggagccagcagtccccccagagaggcccagtggcgctgctctccacctctgcttggcccattgctgggcttctttcaagatcaatttaaaacattacctcctgactgggcacagggctcactcctgtaatcccagcactttgggaggctgaggtgggcggatcacctgagatcaggggtttgagaccagcctggccaacatggtgaaaccctgtctctactgaaaatacaaaaattagccaggcgtggtggcgcatgcctgttgtcctagctactcaggtggctgacacaggggaatcacttgaacctggcaggtggaggttgcaataagccaggaatgcgccattgcactccagcctgggcaacacaacaaaactccgtctcaaaaaaataaaaataaatcacctcctgcaagaagccttctctgacccttgggctgtgtcatggcctgtcttccagcagtctacatcctcctggtcttcccctgctgtggctcttgtcccatggcatgtaattgtcacttctttgggctcccatgctagacaggaacccctgagggacaagtcttacccatctctgtggtcctctttgccaagcagagtccagcacccccagaaatgtttgaatgaaaagtctgaggcagtgatgaatgggtgtaccggttccatctatgaagccttttcttccccacaactggcctatgtcggaggagaatctgggttggatgttagcaggagagaatgcctccttgcttagaagagccttgaatgccaggctcagatccatttgaccagaagagctccttgaggtctggccagcatctgtgggtaccaggatcccccacagatgtgtgtggcacccacagatgccttctctagcagtgttagtaatatagatcccagaggtgagttttgttttggggggtttttttgagacaaggtctcactctgtcgcccaggctggagtacagtggtacaatctcagcttactgcaacctctgcctcctgggctcaagcagtcctcctgcctcagccttccaagtacctgggactacagccatgtgccaccatacccagctaatttttttttttattaaaattatctccctaggagtcatagagatggggtctcactatattgcccaggctgttttcaaactctgagctcaagcaatcctcccacctcagcctcccaaaggatgggattacaggtatatgccaccacacccagcatatcccagaggttttaacatattctctagactatgtcctctgcctggggacctcaccccctaaggaaggagaataccctgggccaggatctgctctctggaatacccttgtgtacttttctgatgaggtgccttacagaggaaatccaagggaaagagaagatgtagccccatcttcaagaacttctctccagagggaggaaggagaggtgggcccataccacgaaggtggagaaaaatcacaagccctctctgcaccccagcttacttgttcccaacagcattcctacaaagtaggggtgtcctcatttttcagataaggaaacagcctctgaagggtcacccagtgtaaggatgcatctgccttcttcatccctgtagcccagtacccgacacacagtagccccatagccctaggcacaaatggggtagagagaccctgaccacatcctgtggaaggtccagagcagagccatcacagagggcttccgaagaccaggatacccttgttcctgggctgctgggctgctgaacagcggggaagaggagctgcgtgaacctagattccatgtgactttatctggctgcataatgagcttaagtattcagatcttttcttggaaatctcaagtattccatttggctgcctcacagagttaggcaattttatttactcatgctaaacagggccattttcagagaggaaattatgcaatgtactatgcaaatgtggcattccgagagcagagataagtgtggtcaccgatgcattgtaagatgagatcgtgtctctggcagctgggtgtcacttgataaggggatatgccagactgtacttggaactgctgctcccttggactcggtttctggtaattgtgttttcaccaagttgtcaagctgtgaactgcacgtattgaagaagaggaacaaggagtgaagcttttgcaagttgctcatccttaagtagacttcagcagtcagagaggctgcccccatacatgttctggacacatgggaacaaggagggtaaaattctcatcctccattctcccaagaagagtcttaaaatttgacacgggggaaagatgaagacacacaactggttttcctggccactgtgaaaaccagtcacctcattttactagacatggcatgtgcctttcacactgagagaaaggaagtagctgtggaaaaccccacctttggaagcagacagagctgagcccaaagctagcacttcccccagcctgtgggtacctgagattgaggcacccagcctccccaagccttcagctccctgcctgaaaatggcactttcagttagttattgctcctgggccgtgtaccagtcacaaagacagccaacccttcacacagccactgctcagatagttgttgagtgagccagtgacagatttatccacctctatctgtaaagtgagcattgatacagtgtcctcagtggccctgagtgtgctgggagacatgaagattctgcagagttaagagattctggaaagagtcctacagagggctccatccaaactctttccattcaaatccttgctattcaacttgggaacaaaatggatcttcacaatgataggatcctgtagtcatcacacaaaagtgatataaaggaggccagaaaactaataatttgagtgcagattctgcatactgaccagtcaccttgtgtcaaatctgttgtaatttgcctgaacttcacaacaatgctaggaagtccatttttccccaaaaaattttattttgaaaccttccaagcatacaaccaagttgaaagaattgtatagtgaacaccctcatacttgtctacttgtcttatcacgtatctactttatccaccaaacttttttgtgggggagagttagagtctctctcacccaggctggagtgcagtgttttgatcatagctcactgcagcctcgaactcctgggcccgagtgagcttcccacttcggcctccgaagcagctaggattacaggtgtgagccaccacacccagctcaatttttttttttttttttttttagatggggtattgctatgtttcccaggcgagaatagctctggctatgttaaccaagctggagtttacaggcttagtcttagtgctgtagcctcaaactcctggcctcaagcaatcctcctgcctcagcctcctgagttgtgggactatagttgcatgccaccacacctggcttctcttctttttttttttaagatacttttccttagaggtgaggaagtgaatctttttaaaaatttatttcaaagtaaattgcaggcctcagtacccttctccccaaatactccagcttgcatatcatgaagtagagctataaaattattttattaccccccgcctatagatgagacaactgaagcaaagtcacatgcccagggtcaccacagctggaaggtggcagagttaccactcaactccaggcacttggcccaggcccggcttgggactgttgccctgcacagcttctcctgcattcagacctgtgcttcttggtggggaagtggagctggaatgtgttaggagaacacaagagttttcttaacagtgctctgccggttactcttggtggtgtgggcagaggggtgtggagaggcggcagaggcccggacatcagtgtggcacctgtagtgggacgcccagtgaacagctcaaaccttaaaaccaagcagtaggtcccagtttccccgggtaactgaatttcaacaaataccccattatctacatacctcattgctggtttcctttacaaatcccagaaatgccaccagtacatttttttttttcctcttcatgttagagggtgcggcttataggcctggcagtagaaaggtgccaagacccactctctgtccaggaaatatcacacttcacaactgcccccttttcatgctgggaaggaatgctttagggagccacaaagaagaaaaagtaattgattgctacttgcagcaaataacccataagctgttgctgggttgatggagaaatggttacttaattttcttcaaaggattgatttgactgtcaggagaagcagccaacctaattgagtgtgctagttcacaccctcggtgggaacagtctcagcccttcttttgtcttgaaagtgtcctggattatgaagtcccccaccggagtgagtcgaggctcaggaaggtccaggtgtcctaccatgctgttctgcctctttcaggtgatctgtagaatttaccagggcccagttccttgtcactccagctctgctgggcttacactggaatcagcactggcttccttttcaaagcactcaagttagctcccaaggaaacgtgatttgtttatgccccagaatggctgctgttttcagttttcagtggattctgacagggtggtgacctgggagagatgcattgcactgtcctcctgggctgttgattgacccctcggaccacttaggcttcctctcccctccaccccgcactgagccgtgactcaccaggtactccccagcagtgcagtatggtggccaaggcccctcctgcagctgcattctgtcatcagggaggcatgcgaggctgattttccctcaagtcaccaatgtaattctgtgccacaaagaaccgtctccatcccacagaggctgattccccaagtgtccagcagcttggaagggtagccatccttctgctggtctgaagcaccatgagggcaggctgctgactggtcttgctaactgatggattctagcatctgaaaagagcccaaggggcggacacccagcttcagtctctcctgcatgccaggaagagaaactctcaagggtagaagagagacagcatttcctaagccaaagaaggaactaggtctcctgctcgaaggggccaccaagtgccctgtgaaagggggaccttgccaaggcagtccaggagcatggaggtggcttcagatccttggccaccagggagttaaaccctcagggcttgcctgttgagagctcacatcatttgactgtctccttgccagaaccagccaacatctcccacccaccctctgcagctagcccaggtagagggggcaccaggctgtgaggcagatgagtgctctctctggcctcagccaggggactggaatgccaggttttgatcagcttgttcaggagagtgtgaagttcacatggccatctggctgcatccctcagccacatatgtcactcatcagtttgtgtcattggggaagtcacttgtcctgctgcagtttgtggccacctcataggatctgggaccatgtcaagtggaaagttggggcttggcatataaaagcactttataaaggttggtcttggtgccagcagccattgtcattgatgaaactactgggccgggcgcggtggctcatgcctgtaatcccagcactttgggaggccgaggcgggcggatcacgaggtcaggagatcgagaccatcctggctaacatggtgaaaccccatctctactaaaaatacaaacaaattagccaggcgtggtggcgggcgcctgtagtcccagttactcgggaggctgaggcaggagaatggcatgaacccgggaggcggagcttgcagtgagctgagatcgcgccactgcactccagcctgggcgacagagtgagactgtctcaaaaaaaaaaaaaaaaaaaaaaaaactgggagcaggggccttgattcaaaacagccctgacttttttttttttattagatggagtctcactctgtcacccaggcagtggtgcagtggtgcgatcatgacccagtgcaacctggaactccaggctcaagctatcctcccacctcagcctgggaccacaggtgtgcaccaccacacccagctaatttttttattatttgtaaagacgaggtcttgctatgttgcccagtctggtcttgagctcctgggctcaagtaatcctcccgccttggcctcccaaagtaatgggattacaggtatgagccacctcactcagccctgataatctttcagtacatggctttagagaaccaaagcctggaatggtgctgcatccccaactccggtgaaagccagcaatgctcagtgttttttgccctccctgcaccacccacaggccactgcagttccccctcactaatccctggtaccagcgcagactcgggaatagaaacaagtcaggctggatgggtgtgtggaggggccaagaccacagcccctccctcacacgtgcagccacgggccctccaggtgtcctatcagctgtgggccctgctcttggaattccagggtgagcctgcctttccctcaagggatcagtgttccctgttcctcagcccctcctgacctctgattaaccacacgtgcttgaaagatttgctaatgtttactgaactgctaatttaaactccagccgtagcctaaaacaggctgttggatttcaaagccttggaattctgctggcctggatatccccctgtaaggaaaaagacttgcattctaaatgcagctggagccaccaatgctaagaattaaattatggattggcatccgtattttattgtgaagggattattaaaatacagcaaaagtcagtcagccccatttatcgctcagtaatgggctacagcctgtcagagggggctgtaggggaaggcttcagcccaggagctaaaagaacagttgattgagcagtccctggcctccaagtgggagcaccaaaagacattagcttccttccatcccatccacaaatacttcttcagcaccagccattgcccagaccccctccagagggtacagcagctagtgatactggtcaggaccccttgttttgggagcttacagtctggacagggatgcttcaacacagtcaagaatgacaggcactgggatggggctggggattagggaaatgtagagagggactgggggagcagccagggatgaggggtcaggggaggcctcactgcagagcccggggggcctgtgtatcttgcatattccatgaccttacgggaattctgaaaaacaaccgaaaaccatgattcattttctccctctgaagagactcatttagtcaagagtttgcattcagaaaacatgagtaccttaggcagaagggttccaacgagagagtcatggctccagaaatgtcatggcacttccgagcaatttgacttgtgctgggagaacactaggaccacttctgacaatgaccaccatagcttgcctctgtgatgcatgctgggcacagccccatgcccctcccagataccctgggcagtcctgcaggtggttaagtgttcttcttataaggcagaaacctgagactcagaaaagggaggtgatcggcccagggtcacacagtttaataactggcagagctgggctttaaacccagtctgcacagtgctaaagctcaagttgccgtgatactgctcttcatggtaacagcatgctttttctttcatgctttttccttttctcctcttccttcccagcatcttaaagttgtgttgggaaatggttgtgctagtttcccttcattctgctaaatacttgcaggatcttccaaggtccccaaaacagccaatcctgagttgtttctctaggccagtcttctgagatgcagcatgtagcttcttggtggtactgaaagaattttagaattttagatgtgcctggatgtagcactaaattaaattaccatcacaattatctattgctgagtaaccaaccacatatattaacttcatggcttaaaacaactatgggaattcattttgctagcaaatgtataatttgcccagggctcaatgggaataactctgctccacatggcatcagctggcgtgtatagactgggagctggctgtgggcctggaccttggtttctctctgtgggtgtctccatggctacttgggcttcctcacaacatggtggataggttccaagagcatttttatgactttgcctcagaaatcacaaagcatcacttccattggtactcttttggtctagacaatcactgaggcccactcaggttcaaggagaagggtagaccccaccacttgatgggaggagagtcaaagtcacactatgagaagaacatgtaggtaagaaatattgctgtggccatctttggaaagtatagtccgtaagaaaatccatttcagtgcccctctagtctgtgctgttacaccaaggagaaggtctcagattcagactagtttgtcgtagaaactctgtaactcagatttcctctttttatcaaaagagcaggcattaggctgtaatttaataaatggtcttttctcctctaatcagttttcatgtttaccttaatgattgtaagtaattctgtttttccattcatggtaatgatatgaagtttccttctgaaatttattttaatagaatacaaatgttttagaaaaattaagcataagctctcctttgctgctataaatttactctcgcatgtgcgtatgaataagaatgttcctttgaatgttgtagcaaaagcttctaaacactccgaatgtctgccagttggagagctgttaaatggtgtagagttctccctaccgtgggagagaacgcagctatgaaaaatcacaaggagtgtctcagtgccgatgtgccatcaggaagtgtcaaaagtacaatgtaggcagtgtgggtggcatgccaccatttaagaaaggaaatggagaggagaacatagccccatgagtgcttgaaaatgcacagtggacaggcaacaagagcccgtgcagtggttgcctctgcagaggggcacaggagacacttattatccactgtaaaaaggttttatacctgttaaaatgggaacctaggaatgtgttatctagtgaaagtggttgataagtttaatattttcaaataaaatagaatgggtcaggtgtggtggctcacacctataatcccagcactttgggaggccaaggcaggaggaccacttgatccaggagtttgagaccaggctggacaacatagcaagatcctatctctacaaaaaaaaaaaaaaaaaaaagattacccaggaatgatggcacacctgtagtcctagctacttagaaggctgaggcaggaggatcgcttgggtgcaagagtttgaggctgcggtaagcaatgattgcaccattgcagtccagcctgggtgacagacctatctcagtcaatacatacatacatacatacacacacacatacatatgacatgcagcaaattttctcccctccccaaagaaaaataaaaggtagtgcctgggagtaggagggctatgtcacctttccttggaacaaggttccgctaggaggcatgccataccttcagggtcctgggtaagatggagacatctgccatcctaccttttgcctgtggggcctggttcctccccagaatggaggcttggtctgcacagcctttcatggtccttagccttccacctgggccctgaactcctcttggtgggggccaagcctcattctcagtataggtacttagtgcctagtacagagcctggccccagtaggcaccagactgtgcacgtgcacatgtgagctgaactggacaccagagctcttgaactcacaggtgtgactgtgagaagaactcacacttggaaacatccacagctatgtcccaagggtgctgtcagagagctcttggcttcacgccatcacctggttctcagtgattgtctatcatctgcatgatcaggcagagcccggctggccagcagcttggcctagtgctgctccccaaccctggctgggcctcataaagacctgagtccctttgtgtaaagctgtggaaagagactcacttatttctttattcaattttaagtgtgcaaataacatacctattttccctttagaaaatcagagcagtgtgtagaaactaaaatcggcctgtaattccagcactttgggaggctgaggtgggaggatcccttgagccagcagttcgagtccagcctgggcaacatggcacaaccccatctctacaaaaaataaagaattagctgggcatggatggtgcatgcctttagtcccagtaacttgggagcctgaggtgagaggatcactcgagcctgtgaggccgaggctgcagtaagccatgatcgctcccctgtactccagcctgggtgacagagtgagaccctgtctcaaagaaaaaaaacagaaagaaaaagaaactaaaatcaccttggagcttctttttctactcatcgtatgttcttgagacttggctctcttgaactctctggaaggcgaattcattccatgtcattgctccttggtgttacacagaaggaataaacacattttagttaggctttcccttcttgctggaaaattgactcttcacagtctcttagcccacgcgtgtgagtgtttttcttgggaacataccaattgctaggtcatagaatgtgaaactttcggttttaataaataatgctaatttgtccttcaaaacggctatgctaatttattctcccactagcagcttttgagaaatgccagtttctctgcatcctcattatacctgatgttatcagacatgtttattcttgccaatcctatgggcagaagatggtattttgagttgtttcctgatttcccatgaggatggccgtgtgtgtgtgtgtgtgtgtgtgtgtgtgtgtgtgtgtgtgtgtgtgtggtgtgtgtgtgtgtttattggcaatccccattcctggctgcccccttcccctcatctgtgaatggcctatgcaaatccttcacgtttactactgtatctttggcctcttaaatcatagggataattgatctgatcattgtcttctgataattttcttaatagaatcctaagccccacccctgtagaattggagattcgatgggcagtgagatctggggatggtggatggatgaccaggcagtctcatgtcacctgtcagctgcactggcctctccttgccatggccactcctgagtgtcacgcagggaggctgccacataccacgacagagccgtctgccaccaagtccttcccatggtaccttagcactcagcatactcctgctggctcccaaatgcatgcatgaagcctgcaggcagaggctttagagggtgggccgagttggattccattcagcatttctctcctggatttctcctcaacccaagaccccatggcagtcccaaggtgactagcctgtgtcccccagggctccacagccagggtgtggagcagccgaggactggggcagggtacaggagttccctaaaatgatactggcgggacccacaaaggagtcacccaaaacccgcaattccttgatctcccttgcggatagcatttgcttgtaatctgtagaagccgcttcatttctccttaactgccccacagcctctgaaaagcgagagctccctccctgggatccttcctgtctcactggtgtggccgcattttagttttcttatgaaatctctcactgtgttctcacagggctttgatgtctcaattacatttctgaaagctgttccgttctggggttttatccttccttttttgttctttgtggtggaggtggcaggtctttcttccgctgaagcccctcaggcagccaggctctatgagggagtcgcactgcctgggacaaaccccattgacactgacgtgtatgactgtgtccgttttcccagatcaaactctcagatgaacttcttttgtgaatgtgaaaacagaaggtagtcaagttgtcctgtgtagagtgaggaaagggaaaggagaggagggggaaggaggatagaaagagaaagaaaggaaagaacatgtttattgtttttgttctatttttaaagagtattttttaaaagattcccactgagaaaatgctttaagttttgtttgtttgttttgagacagggctcatcactctgtcacccagaccggagttcagtggtgtgatcacggctctctatagcctcaacctccctgggctcaagtgatcctcctgcctcagcctcctgagtagctgggactacaggcacatgccactacagccagttgatttttctacttttagtagaggtgaggttttgccatgttgcacaggccggtgtggaactcctgggctcaagcgatccacccatctcagtcttcaaaagtgttgggattataggcatgagccaccacgcccggcctgttttaagtattgagtaaagaaaacaaaccctacctaccacaaagaaaatgtttataagaatgaatatgatgacttccttttttaataatgtagaagactagtcatctagagaatcatccagtatggaactaaaaattcatcataagataaacatactattgtacattttatgttaatataatatatttcataatatattaaaacatacatattataaatttttttaaagacaaggtctcactatgttgcccaggatgaactcttgggctcaagcaatcctcccaccttggcctcccatagtgctgagattacaggcatgagccaccgtgcccagccctaaaatatgttttttaaaaaatattttcaaatacccggctggactgttgggaaaggaaagaaggttcttgctgtagataataagaaagcacaactgggccagatgtggtagctcatgcctctaatcccagcactttgggaggtcaaggcaggcggatcacttgaggccaggagtttgagaccagcctggccaacatggtgaaaccctgtctctactaaaaataaaaaaaaaaaaatagccaggcgtggtggtgtttgcctataatcctagctattagggaggctgaggcaggaggatcacttgaacccaggaggcagaggttgcagtgagctgagattgtgccactgtactccagcctgtgcaacagagcaagagtgtctaaaagaaaaaaaaaaggtacaaattcagtaaagcctatctggagctgggatttgctgtgggggtacctggctgacttcgggggtcatgtgctggagagaatagagggaaacacgaggcctgtaaagaccgagaggaccaactgggtgacatccacacgaaaccagaatctcagacaggttacactgtcagaggattgaaccgaggcatatgttgctgggggttacccgagaaaggaaagagaaatttacctgtgcttttagatcaggatgaaaactgaaaaaggagaggggggaaatccttggagaatgcatgagcccagtttgttatcgtgtgctttggccaaaattgataccacccatgttacccttctcctcccctaataaagttgagccaaatatctggttaatgtgctcccaacagaacctattggggtgatggaagtattccacaactgggatgtggtaatacatagccataaatatactaaaactcagcactattcaaaatagtagactcatggagtcaacccaggtgcccatcaatggtggactgaatgaagaaaatgtagtacgtatacactatggaatactgtgtacagccataaaaaagaactaagtcatgtcctttgaagcaacatggatgcagctggcagcctaagtgaattaatgtgggaacagaaaaccaaataccgcatgttcttacttataagtgggagctcaacattggatactcatggacataaagatggcagcgatagacactgtgtactgccaaaggcaggggggtgacaggggttgaaaaactgttgggtactatgctcaaaaaaagaaaaaaattactaaaactcaaaccgtatacttaaaataggtaaactgtatacttaaaataggtgaactttatggcgtgtaaattatactttaataaaactatgaagaaacaacaaaacatctcacctaccctcttctaatcagaggcttctgttaatgttttggcacattttctctgtactagtatttctttgtagggatagttttttttaaaacatacaaaactcttggtaataacatttttatcatctttcatttaaaattataatgttttccacagtcattgcaattatttgtaaaacatgatttttaacttgggcttattatatgtgttcgaaagtatgtcttgaatacttttctcattttaaaataatgtcccagtagagtgggacatagaataaaaatgaaagttctccccttaatacttctcccacacacacacactcctacccccaattctcacttcgctcctcatgggtaaccactgtccacagtttggttaaacaatttttaaatgggtatataattttgcatctggtgggaaaaaattgcactcaaatagttctcctgtttggggacatttaggttgtttccggactgagctctcttgtttaaaacataagtggcagaggattgcatacagcggtagaccatagatctaatggtcctatgttaccctggtgatttccaagtcaagggtagacattaaattagacattgaatttggggataactttctttttcttttcttttctttttttttagacagggtctcgcttttgtcacctaggctacagtgcagtggtacactcatggctcactgcagcctctacctcctgggctcaagcagtcctcccgcatcagcctcctaagtagctgtgaggctaattttttttctgctttttgtagagacagggtctcactatgttgcccaggctggtcttgaactcctgggctcaagcattcctcccaccttggcctcccaaactgttgggattacaggcacaaaccactgcacccagctggggacaactttcaagtaagagaaggaacctagcatatgcagaggactcctatgcacaagaccccatgcttttcccgccttttctcatttaacgcaccaaacaattcaagataagggacgtaattctcattttacaaatgggaaaactggttctgaagggccaagtgctgtacacatccaatgcccatccatgtacaacatccagtgcagggcttggctttaaattgtcataccctgagttgagggcttggtgattctgtcatggctcaggggactcttgctttactgtctttacttaattaggtgaactcagtttaaccatcacaactgtaaactgccattagtctttaaagaagcactgaaatgttactgaggttcttggtttaagtaagttccatttgtctatttttggctttgttgcctgtgcctttgaggtcttagtcatacattctttgcatagaccaatgtccagagagttttccccagattttcttctaggatttttatagttctgggtcttacatttaagtctttaatctatcttgagttggtttttgtatacagtgagagagaggggtccagtttcattcttctgcatatggctgtccggttttctcagcaccatttattgaagatggtgttctttccccagcgtatgttcttatcagtttcattgaagatcacttgactgtaaatatgtggctttatttctgggctctctattctgttctgttggtccatgtgtttttctttttgttattttttgagacaaggtcttattctgtcacccaggctgaagtgctgtggtgcgatcttggctcactgcaacttcgcctctcaggttcaagcgattctccacctcagcctcccgagtagctgggactacaggcacacaccaccacgctcagctaattttttttattttttggtagagacagtgtttcaccatgttggccaagttggccttgtaagtcgtgacgtcaagtgatctgcccacctcggcctcccagagtgctggaattacaggcatgagccacagcacccagcctatatgtctatttttataccagtaccatgctgtgttggttattacagccttgtaatttgaagtcaggtagtgtgatgcttccagctttgctctttttttgtttgttttgagaccaggtctctgtcatccaggctggagtgcagtggcatgatcatggctcattgcagccttgaaccaccctgggctcaagccatcctcccacctgagcctcctgagtggctgagactacaggtgtgggccaccacactcaactaattttttgcattttttgtagagatggggttttgccttgttgcccaggctagtctccaactcctgagctgaagcgatcctccctcctcggactcccaaagtgctggaattacaggtgtgagccatcacacctggcctagctttgctctttttgctcaggtgtgctctggctctttgggctcttttttggtgccatatgaattttaggattttttttctaatactgtgaaaaatgatgttggtattttgataggaattgcattgaatgtgtagctcgccttgggtagcatggtcactttaacgatatcatttcttctgatccatgagcgttggatgtttctccatttgtttgtgtcatcttcagtttctttcttggattgctgattgttttgttgttttgttttgtgttgtgttgttttgttttgttttgttttgtttgagacggagttttgctcttattgcccaggttggagtgcagagcgcgatcttggctcactgcaacctccacctcccagatacaagcaattctcctgcctcagcctcctgagtagctgggattacaggtgcccaccaccacacccagctaatcttttgtagttttagtagagacaggatttcaccatgttggccagtctggtctcgaactcttcacctcaggtgatccacctgccttggcctcccaaagtgctgggattgcaggcgtgagccatggcacccagccatgctggttgtttttaagctacggcttgagcacctaacatgcagtaaacattggacagatgctttatgtactttatatgctttatatcagtcctaactagtagcagtttgagggagtgtgcattctctttattatccagatgagggatctgaggtccagagaggaaaagaaactttcccggcataactgtcagagaagggactcagacctaggtctgtgtgactctaggcctgggctctaaccactgagctctgctcctgatagaatgagagtcagctttggtgtctccatcaccctgggcagccagactgtgcctcattctcttctcaccttcctcctcccagataacagcgacttgattgcatgtacagtgatcaccaaggatggcggcatggtccagcgattcctggctgtggatatttaccagatgagtttggtggagcctgatgtgtccaggcttggctggggagtggtcaagtttgcaggcctattgcaggtaagatggccaggagctctgggatctgttcgcagttggctacaaacacacacacacacacacacacacaccacacacaattgtcatctttatcattaatttgtagtgatattatacaaggtatatgtgaacaaattgtcacccaaaaaaaagctaaaataccacataaatgcacagataagagcaaagtcctctttgaccaaaacgctcgattcttacacctcccctccaccagagataatcttcattatcagtgtgacctttccagatctgtttttctgccaaaggcatatataaatgtaactacatgtactatttttaaaaattatatacatatacttgagagtgtatgtgtgtgttttttatgatatcacattgaatatgttctaaactttgcttttgtcattcaatatcaatagtgtgtcttggagagccagccacattagtacacgcagacttcctggtattctttttcactgctttgtgactatagcaaggcatacttaacccatgccgtgtcggctatttccagttttctgctatttcagcagacggtgctgccatgaacagaatcactcttacttctttatgcacttgggcaaggtttccctaggcagataccaagaagctggggtgtactaattttaagtgttagtagacactgccaaataccactctaaaatgattgttgccactggcatttttgtgaattcccttccgctcaacgtcaccccagcagagctaggctctaacttgccaagtaccaagctggggcttgggttttggggattttttgggtttttttttgtttttaatgtttgccaacgtgggccagacgtggtggctcgtgtctgtaatcccagcactttgaggggccaagtcaggtggatcacttgaggtcaggagttcgagaccagcctggccaacatggtgaaaccccgtctctactaaaaatacaaaaattagccgggcatgatagcaggcacctgtaatcccagctacccaggaggctgaggcacgagaatcgcttgaacctaggaggcagaggatgcagtgagctgagatcgtgccactgcactccagcctgggcggcagagtgagaccctgtctcaaaaaaaaaaaaaaaaaaaaaaaaaaaagtttgtcaacgtgatagataactagtaccagctctttgagtgaataaagcaaagaatcagaagggttgaaagcagcctcccaggtcgcccctctgccataccccttgtccctggatgtccagctgacacttcaggcctgaactttgccctacttcaaggcagtccatttctttgccagccagccctggtttctggaagggccttgctcaggccgccccacctctgccttgccgcagcctgacctgctgtctgtgtcctgctctctgcgagaaccacccacatacttgaagctgctgttacagcctcttccccagcctcctcttcttcaggatctttctattgtaaaagtgtcttttacaaagtgtggtgtgagaaacaactatagaagaatctttcatttaaaagaaacactccatgtaagacattatccattaagtgacttatgcttatctatctaggctttatctaggcttatgattaatttcctttagaatttagtgtcaggcaagtgtttttctcccctgaagaattaatatgtgtcttccatcagacaatgaaagccacataaacctttttttttggccgtcttccaatgggtgctatttgtcaggtctttactataccagactccctgctttaaatgcagaatgcctcatctgatcttactgccgcgttttgatgggggtgttatctccaaagagcctgtgccaaatgtagtgcctgagaaccacaaccatcttcctctgtgagccttttccaatgttgtccccacctcctttaacatttctgacttttgtgttcattccctctcaggcttttatatcagatcacctcaaaccttcatgggagtagattgtctatgcagagtccgttctgaggttttagactggtttgtctttattatattttgctacatgttcatttattctccacctttgaaacacagtttccttcaaatctctgctcaatgaccttccctatccctttctttttttttttttttttttttttttgagatggagtctcattctgttgcccgggctggagtgcagtggttcgatctcggctcactgcaacctctgccttccgggttcaagcgattctcctgccttagcctcctgagtagctggaactacaagcgcacgccaccatgcttggctaatttttgtgtttttagtacagactgggtttcaccctcttggccaggctggtctcgaactcctgacctcgtgttccacccacttcggcctcccaaagtgctggaattataggcgtgagccaccgtgcccagcccctgtccctttctcaggattagcttttccctttggggaccagaagtttgtcaaagacatacaaatggttgccaacgatgtccccttcttagaagaaataaggaagaaattgatgagtagatgagcaactatatctgagatcatgccagatggtaatagtaattttggttcattatctctggcttctcagaagtaagagtttgcctgtggtgttacctgtggccccttgaagaggcttgtgggggtacgctgttattcatgagctgaccccagtcctcatggaaaacaggcaccagccaccaccaccagcatccgctcctttggggtactctgtgcctcctcccacactgtcctctcccactgggcctggtctgccttgtgcccatccatgactctgttggacttgggaggctgtcgatcttagatcaaaagcagagatgaatttggagacctctttctagatgcctcatgatgccacagctcctagccaccctcctcccaaacccaacgaatgccttttcctttgcttctcactgtgcaggacatgcaggtgactggcgtggaggacgacagccgtgccctgaacatcaccatccacaagcctgcgtccagcccccattccaagcccttccccatcctccaggccaccttcatcttctcagaccacatccgctgcatcatcgccaagcagcgcctggccaaaggccgcatccaggcaaggcgcatgaagatgcagagaatagctggtgagtggctggaccctggcagggcatcctctgagcacttggtgggtcagggctgtttgtagttctcacactgaccttgagaacccccatagcatagaagaagacacgtatgattcaggaattgttttatatacgaatacgaggaagttccatttcctgggtgtttggtttctggtgagtttctagggctgcatggaagagaagaggagctctccctagcaggcaggaggccagcaataagtagacgtcagtgtgggaccactcttctcagcccttcacactgaaattctcaagcatatgttaacaaagtgctttgacgttactctaccacctccgatccttaaaacaactctggagttctgtagggcctgctctgcccattttacggagaaggaaacaggctcagggacttgcccaaagtcacacaggcagaacccacaggcagaacttcctactgtaaacttaccccttcctccttccccttcccagttcttataagaggcagccctgcttggtgaaaggctggaacccttggaaggaagtcattttacatttcacggggattgcggtgaatttctgaggaagcccaacactgcccagtattaggaaggccaggatttattacaaggaaagtcacagaaatgagggagatgcgttcattgggcaggaaggcaaggccttctcctcggcgtggggggaaggcatgctgtcaactcctaaaatgacagtctttctcaagatacccagtgccattcagttcaggcaccagtgctcatcctggtggctgctgagaggattttaagcctacctggggatgtgggggtgctttctcaagggataactttaaaataagcccttgaccaggcacggtggttcatgtctgtaatctcagcacttcgggaggccaaggcgggtaactcacttgcgcccaggaattcgaggccagcctgggaaacatggcaagaccctgtctctacaaagaaattacaaaaatgagccaggcgtggtggcatacgcctgtagtcccagctattcgggaggctgaggcgggaggatcacttgagcctgggaggtggaggttacagtgagccatgattgcaccactgcactccatcttaggagacggggtgagaccctgtctcaaaataaaccctcagagggccagtttctgggcgttaccgatgcgatgatttactgtgctgatttgcacaggcccgcgtcccacgttgtcgtccccgtctcatttctcacttagctgaaacttggcctacaaaatcattactgaagcattctgtaatgtgcaaagtgacttaaatcattcagccctttcttttaagatttattttcagagagttttttttttttcttcatgtaaagcaatttctcacagctggcatgaaggccaaatacttcatttgaaaattgagaattatgctgtaaagtggctgttagaactaaagccttgggtatttcttaaattgattttaaaaagcccctccgtatggatatattgggaggtttatttatggaagggaggttagtggctgagacagataaacacccactcagagttacacatgtacatgcacatccatattttcgcatgctcctgcacgtgtgcggatatacatacacacgtatacgtgtgaactctctgggcagactcggccccactcgcttggggtctgaaacagcctttgtcagggtcctttacacatggaagctgagaatccaaagtggaaattgacccagcttccattccactcgaggagcccaggctcaaacccctttctccttggtctcaaccttggcccgaagccctcacttggcttccgcttgtgcgttgagcctcagtgggaactttgatgttccactggtctctgcagcttgaggctgcctgccgcccacttggcgtctcccaagtgatgtgcctggcagggccacagccactacgatgtccccccccccaaattctcaccacccccctctatcccacatgctcagagtgaaccatgctattgtttgaccgtagccctcctggacctcccaatccagcccaccactgaagtcctggggtttggactcggctcctccacctccactcagcacctgcctttccgcttctacgaccaggggcgccggggcagcagcgaccccacagtgcagcgctccgtgtttgcatcggtggacaaggtgccaggtgagccagccccccgccctgcgccacagctcgttcatcatggtgggcgttcaaggtctttctctctgtggagcctgtgtgagctgcccttcctctctcagaagccccgtcggctggcagcaccagcttcttagaatttgtcaaagcacagcgcaagattaaacacagcccccaaaataaattttggctttccctttagtgtttggtttggttttccagagatttgttgggtatgtggaagaacttctcagaattgactaagaattttcttggaaatttcttggaaacatttaaatgattagtgctgaagttgtgggagagtaatttccttctccatgtaagatgactagaaagagagagtgtgtttggttccggttacaaccccctgaagaagtgagacttcaaaagaaggccgtgctgcccacaggtcagctgtccactccttccatatgagggcgtctcctcccacttttgccacagctcatctctaaccctgctcctccgctcctcccaaaacagaaacttgaatggaaagtccattgctgatttgtcagagtggaaaggaccacttctccagaagaccgagttctccccttcctgttctgacatgtctgctttaagtaaatccgtatgcaccccgatccctcgaaagagagcctttcttttggttgcaaaagtttagagcgctggccaagctctccctcacaacttaacccctccccatatagggcttcaaacttaagttgcaagtgttgtgaaatgttttcaaaagcagttattgatttaagaacaaaacgcagccataggaacctgctcaaaacccgagtcctggttcccccatgtgatttattttagtttcattgtttgataattcattatttatatgtatataccgtaggcatatgattttttaaaatccagacaggagatgatcaaatgaaaaataagtctactttgcttcagaagtaactattgttaacagtttcttgcctgtctttccagaaatatttctttgtatgtcatgcatatgtttgttttttacacatggggtataccgtatgtctgatgctgcaccttgctacttcttccttaatagaaagtgtcacacattaacacgtataaatcaacctaattctccttaactgttacatggtattttgtcatatggatgggcaaaaaaatcttttttgctgtttcgtatttgggtcatttccagtgttttgctcttacagtgtcacagtgagcatccttagggtgtctttgtgtaattgtgcaaatttcgcatgtctgtgtgataaattcctagcagtgaatttgccaaaggggaaggtttttaatcttgatatatgtagtcccaacgtgaactctagaaaacagtacaccaattcactctgccacccacagcttgtgattggtttctttcttaaatccagtctcagggctgggcatggcggctcatgccagtaatcctagcactttgggaggctaagacaaggcggattgcttgagcccaggagtttgagaccagcctgggcaacacagtgagacatcgtgtctagtataaataaaaaattagccaggcatggtggtgggcacctgtggtctcagctacactcaggaggctgaggtgggagggtcacttgagcccaggaggttgacgctgcagtgagctatgattgtaccattgccctccagcctgggcaacagagtgagaccctgtctcaaaaagaaaagaaaaaaataatcttaggctgagagactgattgtggcaccgcctgttttcagtgatgaaatgtgagatgattctgcctgtttcagggtcaggaggattctttgcttaaaaaattctgcaggttgcttcgtgttctgtggctatgattgctaagtaaatataaagtgtgactgagtctaagttaactaagtacaaattgacctggtaagaaatgacttctttagggtcattgaggcgtctttcagtttcggaacttactggttaaagagaaaagcccaggccttatttctgctctgagcccttttggaacaaggtagaatgtaaataaatacatggagccaagcggcccattcttcagcatctacatgatcatttctctgtttgcagaatgctttaggatgacttattgcttacctcttctaccctgcctggccttccaccggtgggtgagaacatcaaatgccaggagtgtggcccggctccagaacctgggcctgcctgccggggtggttggcacagctgggatgccccatgtcctgttgctggtcccagggtcagcaagtgtgaggctgtgccaactgggacaacagcaagtcagaggtggctgctgaaggcagcatccaccccttggctgtgtctcccctgactgcccctggaagtgccactcagctatgaggagtgagatggagacattcttatttatcacaccacccccgcaaagagggaggcctcgctgccctcccaccttggcttggcaccagagctgtgtcctgaagagcaagttgaaatccctgagccttggcatggtgggagcataggctgcccccacccccatctcagtagtcagggtcccccacagcagcagccactcagcactttggaatcattcttaaaacttttcaccctgcttccacacccaccagcctgcttggcctccagaaaatactgagatccgagatctcctctcccagatctcccaagattgcaacagaagccttctcaggatccctagcttccattcagccagtgggatcattctagtacttaaatcagattacgtcatacccctgcctccagctttttggtagtttcctgttgcacttagaacaaaatccacatctctccttctgatcttgggtggtggctgtgagatccggccccaactggcctctcagatgaagttcccccaaccccaagctcactctagccccaaccccagccttgccagcccctgctgctcctctaagctagcatttctcagagttttagcctcagcacccacgtgtttatctgcttaaaaagtattacagaacttaaagagctttcatttagatagattatatttatagatatttatgacattagaaattaaaactaagaaatgctttcaatatatacttcttgaataaacccattgcatatatgcataactaacatagttttctatgaacaataactctgttttccaaaacatagaaaaaaattgatcttgcacatttctgcaagtctctttaatgcctggcttaatagaagacatctggattctcctctttgcttctgttttctgtctgttgtgatagcatgcattctgtggcctctggaaaactcctcagtacacccctgggaatatgaacataaaagaaaaatgtcttactatttttatgaaaacaaggatttccagaccacactttgagacccactcctgtaaatcactgtggccttccctgccccagggccttgcactggatgtctgtacccagatgttggtgtagctgcctcccgctaacggctcaggcttagtctgtgtgccgcctcttcagtggccttttcagatcagctcctggctagggttgtcccctcccgccactgcattggcctggttccttttttttttttttttttgagatggagtctctctctgtcgcccaggctggggtgcagtggcacagtcttggctcactgcaagctccgcctcccgggttcacaccattctcctgcctcagcctccctagtagctggtactacaggcgcccaccaccacgcccggttaattttttgtatttttagtagagatggggtttcaccgtgttagccaggatggtctcgatctcctgacattgtgatccgcctgtctcggcctcccaaagtgctgggattacaggcgtgagccaccgcacccagcctagcctggttccgtttatccacagcactgaggttccttacctggctgatgcctttgtgtgcctggtcatagtctttctcccctgcagagagggttgcctgcgtgggaaccttctgtgctgtttaccctgcatctcagcgcctagctctgtgcccccacttagtatcgttgagtgaagaatgagcctgcatttgttatctgctcagccttggaacagagcccatcaaaggccttctcccttctctgaacacgggaagacaaggaaagtccctctggggccctagatacttggtggtttagtccatggaactttgacaagggaacacaaaggaactgagaaccgagaagaccttaagcagcatccctcggctaaatttctgtcaccaagcgagcaagatgtgtgtccaaggaccatgtacccaggtgacagatttaggttggttgcatatcaactgaatttcaccaccctcctcctactcagagttttacagaagccacagagtagtgacacggggagccgggcagtggagggagattcggtcatcagaaacctggcccaggttggcctctgatactgtgacatgtcaccattgccatcaagggcccgtgggtgctggggcgtgaccacttcccaccctccacaatggtgcccctccccataggccgcacagcgcatggagtccttgcttctgcctagataataattcacaaggaagaaaacaactctggctgctgcctcggggtggctgccagacaagggtgttttattaggacacatcttccgattttatctgcgggcccaggtaattgtcatagagcagtttgtctcccctttagaagctataaacgattgtatttgatgaaaatatgcctttcatttccttggatgagatattaaagtagtgtataaatcagggctaataggtgactagccactttggtgtatttttcttcttccatttggctcagaaaaaaaaaatcacaagttctatttattggctggttttatgttgatggctctcaccctcacagaatgttcagcttcacgagggattgtgcgtgcgcctggccaaggaggggggtcagtggcggccagtatgtgggggtgggcaggcatggccaggcctagactctagcctgagcactctgtggctttgagtgccatgttgctgtggttagtgcctcatggacctggcccatggcaacagctgcttctagagatagaatctgtcatgatgggcagggtgtccaaaactcgcctgcaaggccaccctttccataaactccaagtggaccagcagaccccagagcagaagctgttccccagaaatgacccaggggtgtcaggggctacggcctcccagaacagccttgctcctcactctgggctcctactggcccagaggctgcttcaggaggccgcagggaaccagagctgcttacaggtgttaccctggtgggttggtgggtgtgggaagggctggcagagcacacagctcagaggagcagccaggcaggttgacatctcctggcccttgcagatgagggcttagtgacatgacaaaaaagtgacctgttcccacctggtttaccatcaaccgctccccaccagcctgttaactccgggacagggacttctctgcctcttctgctgctctctccttaaaacccaccagcccctcctgtcaccagcccctctctgtggcccatggtcccatgcagtctggcccctgccctcttctgggatcagctcccagccctctctcccctcggctctctgcagatgacacaatccagcccttcagccgcactggctggctggctgtgcctcaccagggccaagtgcgtcccatttcagggcctctgttttcgtgcttccctccgcctggagccctctgcatggctggttccttctcagcactcagggctctgctccgatacctcaaaaaggggccttccctgagtgcccaggtcaccctagttctctgcacggcagcttgtttttaattgaggtgaaatttaacacaacataaaactaaccacttgaaagtgaacaattcagtggcatttagaaccttcccaagattgtgccatcatcctctcctctagttccaaaacatttccatcccctcaaaagaaaaccccatagccattaagtagtcatcgcccacccaccccccccgcccccgcccccatccagcccctggcatccactaatctgctttctgtctctatagatttacgtagtctgggtatttcatatcaatcatacaatccatggcctttcatgcctggcttctttcagtttgcatcatgttttcaaggtgcatctatccttcttttagctgaataatatgcattatatggatagacgttgttttgcttccaccttcatccatcaatgcacatttgggctgtgtctgccttttggctattgttgaatgggttgctgcgaacattcgtgcacaagcttttgtttgaacgcctgttttgttttcagttatttctggtatatacctaggagtaaaaagtaggtcatgtgacaatctaactttctgaggaattgccagaccgttttcccatggtcttcatagtccttagctttagctgaaattgcctcttgtattccttgttctctgacactatcctgcactagaatggaaggcacttggccagggggtgggtacagggttgtggggaacctcgtttgtcttgtccttgacagtgctcatggatgcctatgaagtagttgctcagtgaataccgatgtgtgggcggatggatgcattggtggatgggaggctgggggacagaggatggggctggaggaattgttcagtcttgttttcccaacagactgtaaacccctaaggccagggtatttctgtcttattcaggtctggtaccctgtgccagttggtggtggtttgggtgtgagctggcaagttggacttcatcccttaagggctaagctggactttattcacttcctgtcccagcttcctactgggtttggggctccagctgtcttgtggtagatatttaactcccctgtatcacctgaggtcaggagttcgagaccagcctggccgacatggcgaaacctcgtctctactaaaagtacaaaaattatcccagtgtggtggcgggcacctgtagtcccagctactcgggaggctgaggcaggagaatcacttgaacccgggaggtggaggttgcagtgagctgagatcttgccattgcactctagcctgggtgacagagtgagactctgtctcaaaaaaaaaaaaaaattttttttttgactctcctgagtatctgggccatgccttgcttttcaccggtgttatctttatcaaaggcacctaaaccggcagggtcagtcacgtgacccagagcacttaatagttccgtggaaaagcctcgccggttccagaggcagcccttggcagctgagtaacttaggaagaatgcagaaatgacagtgtgctatgagccagctgagctgaccgcaaagcctctgaccgccatccaaaaaggcaaaaagaaaattgatgtttcattcatagacatcagttcagacctcccctgagaataacgtcctaggtgctaatgtcatctcatggtggcattttccaggaactaattttttagtcctcttatttttcttgtttctgattataaaactggagccagttctctccttgtagctccccaaggcaaaaaataccctttctggagtcacacaggaagaaggacctggggcttcctccagcttctccagcccggtcttaaccctttcccagccttcagctcactgcttagagacttgggccagcaggttagtgaggcgggtccgtgagttatggaaatttgattcctaccctcaggccttttataaagcaaaatttattgagctgctaagcactttatgcattattcttgttcgagcttcccaatagccctcagaaggaagatgttaccattttccctttcggcaggtcagaaagtggcctacccaaggtcacaccagataccctccctccagcgtcagaccctgagtcccaccaccatgctgaaccaacttttaattcatagctaatgtgaattccccttttctgattttttttttttttttttttttgaaagaagggcctaacagcagccacctaaggcctcactggtaccaggcaaaactacgttgtcggctccaactctaagcatattttagacagaaaaatttgtatctatttctggaagtgtgagctataatttggaagaattaaccatgttgggcactttatatgcacgaattctatcctcccgaccaccctggaagctggtatcacttgctctgcctcacagataggaaactgaggctcaaagcaagactgcagagctcacatgagataggctgagatctgtacctccccttcctgcctctaaatcccatttgcttcaaggctggcattggtgcaggttgaatattccttatccaagatgcttgggaccatgagtgttttgaattttggatttgggggaattttggaatatttgcattatacttacttactggtttagcttcactaatctaaaaatccgaaatctgaaatgctccgatgtgtgtttcctttgagtgtcatgtcgacactcaaaaagttttggattttggattttcagatttggattgctcaacctgcaatgactgagctacttcgcatggcagctctgcctgtctcagaatgtcagagatcagtaggataggccctccttagagaggggcctcaagggatgcccctggtctagacagaatgttccctactcccctcttccgtcatccaccctggcataggcccacatcctcgtgccccaagacccacttccagtgtttcaaggacaaacctgcaaagcagcaatccagaaagatgctccgtcctgagaccaccacttccaaaccaggctagcggtgcagggctcgttcctgcacaggtttgtccctggtgtgcatgaacaaaaagcagaaggatgacttcaaaatcctgcctgaacaaaagcagcaggatttgagcccctttcaaagctttctggcaattgcctctaagagatcagccttcaagtggtggggcaggggtgtggggaacagatcctactcaaaaatcagccctgagctgagtccaaggggtctcctgtttgccaagcctcttttcagggctccagagcagctgtggagagagagagcctcagggaatctggagctgggctcacacagccagagaaggaaccgcgttcccggatccgggcctgcaaggtttccccactcacaacatgccccccaaagacactttcccaatagacacagtagcacttgtcatggggagccctctctcgctaaatatggacacagtaggcagggccagccatcttgcccagatgcttttctgggaggtggagggaggggaagaagagagttccaaagaactgagtgttgcttcactctttggggtcattacctaactcatactgccaaagcgactgtatgcccgggagccttctggtcataagagtgtgtcagatggcagggaacactccctggttgctaatagagaagcccgtgcagtaggtggggggagagaacaaaccccatatgcaatctgccatttgacctgggccatgccttagaatgttctgtaggctcgggtgggcccgcagcagggcagccatgccggcagcacagcacaggccagtgtcagtggcagagcgggtggcttggccacacaccccgtgtgctcaccagcacgggcctggccccacacgtaggatagagctctccagcctcatcctccagcctcctagtcaagcacatctagtgcataacagaaaagactggaagacaccaagaaaagatcgaacttaccaaatcttcccaccccagggtgtccatgatcaatcccagcatcctttttttcattgtttttcctgttcattcacaatggggtttcttttcccagcagcagagtatttgcccaggtgagaagcagcagaatgaaagcacccagcacaagccaaagagtatgggcccaagtcccagccttccacctccacgggaaaattgttaggtggccttgacccatttggttcaccttgttggatctcagtttattcatataagaaacagggatgatgctcgacaatgtgagtggacttaagaactgaactgtactcttactaatggctcagatggtagattctgttatgtgtaccacaaccgaaaaacaaaaaatgggatacaagtgtcacctcattaggctcttgtgacataaaatgagttcattcacctaagtgcccagaacaatgcctgacccatataaaacgtgcagcaaaggttaactgctcttgccattttgttgttgttgttgttgttgttgttgttagttaagggctgagccttgggaccccagaaaataggttccttttctacacattaatcaattagcacgaacaaaattacgaatgcagtagtccttctgctgtcaattacaaagacatgctgcagtggcacagagttgctctttcacaaagactttccctgggcgttggtaaaacaccggggtgtaatagagcaggcagaattttcctcctcacacagaagagatcctgtaatctgcctgaggccccacagctctcagaggctgagccagggctggagaagagcacaaattgggcctccagcccagcacacatcctgtcccctggggtgctgactgccatcattggcactgcgcccatctgagccaggcagtcccccggagcctcacaacagctctgggaagctagtgtcattcctcagtgcccagtgttaccagctcacaagtggccagccagggctccctggtttccactccgtgaaccgccatgccctccgttctgaagcatattcagaggcagaacacctggaaatcaggtgagctttgggaaccccacatattcttgctgtattctactccatcgtgtgaaccaagagtacagaagtcatcagagagcatgacttgcatctgtgtctcaagtctgtatctaaaggaaaagtccataaaatcacccaaggaaacatcctaagccttttctgttggtgttttttttctttgcttctgaatcatttgttttatcaaccgcaagttctcattaacagacaagtgataggagatgccaaggtgtgaaggcccctttatggcagaaaaccgagaaacgaaaaattcctagcccttaattctgtatgtaagttgataaaagtccatcttgatttgatttttgccttaaaatctctctgactagctcaaagacaatcccctggaacaaggtttgggaaccacttcccaagaattagagtgcctttgggatccaagaaaatgaaatgccagctgggcgcggtggctcacacctttaatcccagcactttgggaggccgaggcgagtggatcacctgaggtcaggagttccagactagctgggtgacagagcgagactccatctaaaaaaaaaaaaaaaaaaaaaaaagtgaaatgccaacatggtgaaatcccatctctactaaaaatacaaaaagtagccgggcgtggtggtgtgtgcctgtagtcccagctactcaggaggctgaggcaggagaattgcttggacctggcaggtggaggttgcagtgaaccaaggtcgcaccactgcactccagcctgggtaacagagcgagactccctctcaaaaaaaagggaaatgcaaataagcagtattgccgagtgcacagttggtgggaaggagagttagttcgtgaggacccactaagaatgggaaaaaccaactgaatcaaaaggcagagatgcagcaataatggtgcctcagagacaggcagaagccatttgattttccacgtggccgtttccttcatgctgctgatggcctcttcaaagcacggcagctcctgggggccagggtacgggaccgcctggtggagaagaattggggtagggaaagaattggcattttttaaaggaacttttacaattccaaggaagtgacatgacaaacatgttgacgagggtcaggaaaaggaaggttggctgagcaagcgtttactaaggcccttgatgaatcaaataaacactgcacagggcttacagagaagcctggggtcagggggagggactgtgagcaagtcttgccagctagtgggctctgtggtgcttctggcttggcacatgcaaaggtgtggctgcagggtagggatgaacagagagctgggaagctcagcagggcccgatagcaaagcgctttgtgagcttgccccatggttcgaattttatcctagaagcagcaggaagccattgaaggttctaagacagatcaggggacatgggtggcaaaatggacttgggttttaactgactggagttgggaagggcagaggagaagggtggagtgggaaggccacaagacacattctggccccttcactgcatgctcacagctgtgcgtcaggtgatgcccgtgggcggatgagaaaagtcccacaggctggggtgcggccttccttacctttctctggccatttgccacttacttgtactataggattatattgcttgtttcaaaaaacctaaatgaccactgttttcactcaacagcgtatcctggagtgtttttcattttagttcgcaggcgcaccctcattcgattttgactgctgcgatcatctggtcaaaccactgttcattgagccagtcccctactgatggatgtttaggtggtggccaattttttgtcctttaacaaataggcatctccaagtgcccttgcgcaagggtttcctcagggtaaataaccatgaagtgaaaacagaaatagctacgctgagaaactaacaggatttggtgaccaatttgactgagggagtgggaagccacagagctagcttaaggcaaaatcttaagaaggcttggtttccctccccgaatgttctctgtgcatttagctagcaagggcatctcgatgatcccaacttctgacccaacagtccttgtgtgtcttgtgggtcttgttctgtccagaaggccttcgggagttgtggtgactagaagggtccccaggaactggtgggggtctccggggtggcccactcatagcttggcttgtcatctcagacagaacctccaagcttggcatgatggagacaccagtgggttctgttcccacctcctggcacctctgctgaggttacagctttctacacttcttttctctctataaccagaatcccatgactaaaatacagttttctttatttgcagctgtccagccatggcatttagtataaatatgcttttctccaaaaacacacacagtattattttttttaacatctcaaattcccaaagggccaaaagtcaatattatcccagtgtgataggaatggctgttttgcaacatctcttcacacttacacagcctgcttgctgaagcctcagagtaatcacaaaaacacattccaaaacccatcagcctggctgctggattgttttactgtctctgtcactccctgctgtgagctcagtccttgaaagtcgccgcctcagtttccatgttgagggtgagaaattcacagcgtgatttggggagcagatgcttcaactgtatgaactgcaaagtttggactgtgaagtgcagtgactcctctgaaaatatttgctagctggtaaaattcaggctcatggcatatgtggtctacttctagccttacagacttatttaaggtcccaggataaaaatcctatttattgaatgccaactatgtgctaggcactgggctaggtgctttacacaaaataaggagataagtatgtaaatactgtataaagttattagtcctacttttatagctggggcaagcaagagtcagaaagcaaggtcccctgcccggagtctcaaagttcatccctggagagggtgcctgcttcttctacctcttctaccggcttcctgagaacaaaagttatctcttgtcctttgttctttctcttcctgctaagttgatttgaaggctctgcagagcttctggggtaacctacgtgcccctttgttgtggctttctgagcacgatgacctcaccggcccacagctgggtctccggtgctgggttccaggcacactccagcctcctggctcacggatgtcctgttgaacctcacggatggctgggtggcaggaagagtcagtgtggatggaatgagccttcctcaaaaacccccaccaccgctcttagtaacccggaaaatgctctgaaatagttgacatttacaaagtcttgggcatttggggagaaaaacgttctttttttggccagatttccagcatgaagcccaagggaaatgtccacgggctcagcacagtggtctagcatctcaaagcagtgcttggcctggtggaggccatggctttcccatcctgccctctctccacatccagcaaagaacaaatgcagaatctggcctgtcctcctgtccccaccatgtcccacagagtggccctttgtgctgacccaacacgaagcacctgaaaggcttgctcaagctgccggacttgagcagcttgaaagccaccatcatcagtgcacctgctgtgcccaggtgtaagccattgtgttgtttaaactgtgccacagccctgccgaggaagccattgcaatcaagaggctagggccacacaccctggagccagaccccccaggttcaaatccacacctacccctagacaactatgtgatgtcaggaagttctgtgaagctcctgagcctctgtgtccccttctttcaaatggggctgatgataggacctgcctcacacagcaggagcttagctgggccagcattttacatgtgagtgcttcacgttatcgtagtgtcataatggccactgctgttgaggagggagccagggctcagacggatagagctgcctgcccaaggtcgcaagctcaggggtggcaagccagcactcccagcttcatggccctggctggagtcacttgcagagcagttggcctggctcctccaggcttttccgtagggtcctcccaagtattctagccagtgcttttgggctctgccagccatatggacagcaccaggcaggtagagttctgagcacctgccctgttggagccaccatggaagtcaccatctctggcatggttccttcttccagccagtgcacaccaagtgcctcctgcaacccgtcctaggcccccgtgcagaggacagctcactcacaggaggcagacatggaaaaggatgaccatggggccagggggatacctgaagtggtgggggcctcaacagggcaagtcacccagagggttcatgccgccagagcacggggtgtggggggcactgggttgtcggggaccgtgggggatctggaggggtgcaaggagacatgtgagtttcattctgcgtgctctgggtggcctcggggccgcgaagcagggaagtggctggacctgacgcatgtctgtccaagctccttgcacgtaccgtgtgggaagtggattggagacagcagtgcggggccactggggtcccaccagaaaccagggcagctgggtgagggacggtatgggatgtgggaggtgcccttggctagcatggtcagtgatggcggtggggacagcgtgcctggttatgacagatctgctcctgagaacggcgctgcctctgcacatcgtgtagcagcttgggacaggcaaagcatttcccatttgtgatctcagtaaccgcagagcgtagtgaggtgggagaggcttgagaggtgagctgaccagcgcaggtcacacaacaggaagcagtagtgtgctttgcacttggcccccacactgtcctgaggttgaaaggtttaaatgactcgggcactggggatgtctgacagagcattctgtgagactcatcgagctgccagcactgggctaagtatctccacagcccaggttcacagcagggaggcaggtatggttactctccctacttaccgggggaggaggctgaggcccagagaggtgaggtaacttgcccgaagtcactcagtggtaggtggtgttgctgaaacccactgctaggccatcggacccccacagtctgctcagtccagtgtccagggatcctcctcagggcccgggaacctgacaaaattcttggccttgccctgggggagctgtagttggaagctgggggcactgtgatcatacttgcagcctcacatgcgtggctcctgggcacgcctgtcagagcgctgtgatcaagcaggcctggaggtgcctgtgcttggcccttggcactaagcagctgtctaggcttcatgagccgagtggcatttgcccgataggtgtgatgtgtcaacagctttttctcctgcttttcacagccccggctggctctgagctagaactcttttaaaaatcataataaggcactgacctgcagtggtacacactggtgcagcccaggcacaggagcctctgcagtggagatttaaggtctgctggtcaggagcaaatttagaatctttctggaaggttctgggtctggccaagagtgtagttaagcccttcagtgatgtgagtttgggacttctttagcttattgtcttcatggatctacagaggtaggcttctgaggaaagcagtggcttgtctttttattcattcctttttccagtaaacttttttatttttttggagacagagtcttgctctatcacccaggctggagtgcagtggcacaatctcagctcactgcaacctccgcccccctggttcaagtgattctcctgcctcagccttccaagtagctgagattacaggcgcctgccaccacgcctagctaatttttgtatttttagtagaaatggagtttcaccatgttggccaggctggtctcgaacttctgacttcaggtgatccacccggccttggcctcccaaagtgcagggattacaggcatgacccactgtgcccggcctatccagtaaacatttattgagcacctactgtgtgccacgccctgtgcttggggttggtgacctggtgagcttgcagtcttgtgagagtgacagacagcattcaactaataacacccattactaatgcatttataatacagagcctggctggtctagtagggatggggaagacatctttgagcaggtgagtgggcagatatcatgccagtcctcgattgacctcagtagggatggcaccaggttccagaggctgaagaagagacctggtgccagcaaatgagacatagggttcatcaaggacttaatgtacagggtcagtccagtggcagcaggctgggtgggaaagccacagccgcttgtaaaaaccatgccacttatatagcagtttcccttagcaccctccccctagcaacctctacctggcaaccttcatttaacctaaaacaaagggcttaagtgaagctactgctgtcagctgcatctgccgtccagcagatcgtgggagtgttcctcagagcagacaggatagggaatagcatgtgcaggggcgcccagggtgagagcagagtaggctcccctgggtccccatcgatgtgacaccttctgcacttgaagctgttaaaggcatcttccattcatgcattagctcatcgtcagaacctccctggggaaaggtaggcatatgttcattttgcagttgaggttttctgaggctcagggtggttaagtaacttacctggagttgcacagctagtgcacagcaaagccagtgtcctatcctggcttggcctgaccctggcctcctgctctgtgttctcattttttattcttattccctatcctgtgttgttactgataaggctcagaggcctgccagaaggatcagaaccccataattatcaagcccattggaggataattctaagtcattgaccttaaatctgcaaacccagaaccttgccttgagagtgcctcctagccctgtcgctcggcactttctcagaatactactaggctggtcatctcccaagctaccttatccaccttagagtgaatacatctctgaaacttggtagggaactgcacccaaatgagcaaatcatgctatcccaggagagcaaggagctgagtgaacatccatcctcttggggcgtccctgcagcctgcagctggacagcggcctcagtctcctgttgccaggggtgacgaggcctgctcagctcagcatagcccttgggtcagctctttgctcctccaggcagacagctgtgttcattctccgtcctgtacctccacaacttctgtgggacagccaactagatgatcaggaagccactcaactggaacctcacaatggcaaagaaaagccaccctcccctcagctgagagggacctacaggcagccctaacagtgcctaggtgcccagaggcatggttcttttggaagtacggagccctcatgcctgtaggatcttccccagcttgaggcccacgcctgagccaggccagccctgtggtcctcggccctagctgtgcatttttaaaatcaccttgaaagcttttagaaaagcccaacatccaggcctaacccagttaagtcacagtgaagagagggccgttggtgacattctcttctgtaggagcagtggctctagcgtgcttggggtaggagggattctgggtataggagtgggatgttttgtgcgctggggccagtttcaggagaggccaattccacaaagcttgtcatgccttgggggacggctgtgctaagaactgggaaatgggttctggatggccctgccctcatggagttcatggtgtcctggggctaactcacttttgtaccagacctagagcagggaaggctctggaaggaagtcttaaaggatgagctaggtttcacgtggtgcatcccggcagggggaatgagcgggctgtgaaaaccaccatgtgcacatgggtcctgcaggcagcctgaggataggggtcagcaggagataaagccacgtgggaatggcccctgctcccgattacctgtcctggacttggttggagggcccagggaatagctgatgggcttcaagcagagggcgaaggtcccactctactccgaccacacacagcccttggagcgggaaaacagtcactgatggggccggccttagggcgggctacccgtggggcccgatgacccacacttagctggaaggaagaggcagccaacaacacttccttgagtcacacagctggagcccaaatccacccattagtccaggaccaaagccaatgtcatccgcggcctctcccactcctgcatccagtccctccccaagcctgtcagctctacctgggagatgcagtcatgacaaggacctctcaccaccacacctgtctcctgggcaaagggctgggtaacttctttaagcagcagagagtcaggcttttagggccatatggtctctgtcgcaacaagcctctcccattgcagccaaagcagctgtagagcatacgttaccaagtgggtggggctgtgcccccatcagtcttccctggcaggacagcaggtggctggatttggcccgcagggcattgtgtgctgactcctgaccttggccaagcctgggccagtggctttaaactcagccccactgttgctctccttgccctctatggtccattcttagcaccaaagatcctttcagggtgtgagtcgggtcaagtgtctcctctacttagattcttcgctggctcccatcactcagatgaaagccaaagtcctcacggtagccccacgttttacacagtttggtccctctgcacttcctgacactaacctcacccccgccatggtccccttggcccacttcaaggcaacttaaggggcctctccgcagccttgaccttgctaggtatgctcctatttggagggccctgacctgggtggcctctgtttggagaagtcgccctgggtacctatgtggctctgtccttgcttccttcagatcattcttcagacctcaccatctcagaaggtcttgccagatattctatatagtggcaaccctgtccccactcccagcactccaggggtctctaccttgctcattccttcagagcactcaacctctcctgacattttctactccttgactggccctgccctgtcccatcccattatcaaactgtaagctccaggaaaacaggcactgtgttttgtttacagctgaatttccaagtcctgggctataccagacatataggtagtgcttggtaagtactggataaatggatcgatggatggatatttggatatagagggatgaatgaataaatagatgaatatagaggatggataaatgggtaaaggggtagatggatgaatggatgtagagggagggagggagggatgggtgtagaaggatggatgggtatagaaggatggaggtggagggagaggggatggatggatgtagagggattgatggatgggtagagagggatggatgggtaggtggattgattggtgtacagggatagatagaagcctggatagatagatggactggcagatgggtaaatgggtaggtggctgctgggtggatagatggatagaggtgcaggaatggatgggtggatggccggatgggagggagggagggagagagggatggatggatggtggagccaacagatctttaatccccccttctgtgtgctaaacattgttcactggggactcaggggttagtcaaacaaaacacatcagcccctttggagctcatgggcactgtggacaccttagatagtctagaacttcccaccatgtttggtgccctcagggaactggcagatgctgagttaatgtccagtaaggggatctgacccagaccaggtgtctgggaaggcttctctgaggaaaggatgttgacctgggaggaggaggtagaggaagagcgccgagaaccttgtgtcccagacaggggctgccatagacaggagagcattgatgtctcagcccacaggctgcccaatccccaaggaatgaatatgttgctgcccgtttgacacctggcaacagtttggctaggcacagaattcccctttgtcatcaatttccgccctggccagataaggggagctgagaccccagtcctgtatcccaggtagatattcagcccagcatgccctgccgtggccctgactactcgcatcattagtacaaaaggaggaatttgacctgggatattttcctgtaatgaattctttggaaagggaaagttcttggacttgggcctgatttgaagatgaaatgttttgagccacgtgcaagagaatggccgacagaacctggagggcaaggttctctgaaggcgaggttccaggttgttctgcagagcagggttaggagtaaagtgtttgtaatcccctgctgcaagctctactcagaacttcttaggtaggggatgaaaatgttctaaattgattgtggaggtggttgcacaactctatgaatacacttaaagtccatgaattgtacactttaaatggattcattgtacagtatgtgaattctatctcaatgaaactgttgtattaaaaaatacagctctcaacttgtcagactgtcacaaagctgtcatccgacagcacataaagaccagattatctcatttgtgtcccattttgatcataaaatagttcaatgtatgtaacattttccttaaagcagtccaaatgtaaaaaaagaagttggaacctgcaacacattccggaataatttggaaaccttgatgcaatccagactcacctggcaccctttctcttccctaaaacgtgccttttttccatttctttttgactttgagaaaaaaactctgttcttactggtaaaatagcctcctgtttccttttctttcctgtaaattatgagataagtttgcatttcatacctttccagaaatctctgttgattgtggtctgacctcagattcatgatttctgggaaagaaagaattagaatcactgctgtgaacattagaagtgcggtgagtagttcgtgttgtggatttgagatggaaaacaggtgaccagtacctgtttgttgttccggaacttatttcctggtgctgctagatggtatgccggcaaccacgtccaactcatgccaatgacttttaaaaatgtcatctcaaatgccacatgttatgtcttggatgtagttagggctagttgtggcctttttgtatggtagaaacctccacctcctggtggaggaggtctggaggcactagaacttgacaatacaggtactgtttattgagcaattactgcatatcagacactgtgccaagcaaggttgtgtgtactcttctcacttaatcctcacaatgatgtatgacatagggattatttcccccatattatgccagggaaatggaggctcaaggctacaatttccattacacagccagtcagcatcagggctgtggcttgaacccatgtctgtctgccaccaaagcccaccctcttagcttatattatgcgcctccgtttccctgtccatactccagcctttagactcccaggccagtgctccatcccctgtatggccaggaaagcacagccatcttgtaggaccaggagcagttcaaataatgagccaacggctggcaccctttctccgagcacagcgatgcaccagaatgctctccctcctgtgacaggtgatgtgcgcttcagctcaggcccagaagagccacaaaagagaagctccagcagttctgtgtaggaggcaggatgtacttctatccatagaagggctctcatgattatttattaattatgaaagggaagaaaaaactaatagagtttcccagaaagggataaaagttcaatatgataaactcccaaaaagcaatcaaaggccaaagagggcagaaaaataaaggacagggagaaagagagatggtgaatcaaagtggccagtatgttagcagaggccaggggaggggccaggcttcacagccagggaggtgtggggctgtcggagcacaagtcaccagtggtggtgagtcaggcaggcagcgggacttgaccccatggggtcactgaggccctggggatgagctgataacaggaatggatggaaccggtcagctgttttgctattactgcagacccgttgtattaatttttgtgcattaatacatgaacgtagaatattataaatgaaaactgagaagctacaggaagaagaaatcacaatcctatcaacccagaagaaagcattgttaatatttctgtttattttccacttctgtcttccctgttttgtctctttctctcatttaaaaaaaaaaatacatgagttgattgttgatttttgaaaaaatcaggctgggcacagtggctcatgcctgtaatctcaacactttgggaggctgaggcaggcagattgcctgagctcaagagttcaagaccagcctgagcaacatggcaaaaccccatctccactaaaaatataaatagccgggcatgatggtgcccaccggtaatcccagctacttgggaagctgagacatgagaatggcttgaacctgggaggcagaggttgcagtgagccaagatcacaccagttcactccagcctgggtgacaaagtgagactgtcttaaaaaaaaaaaaaaattgcaacattgcaggtgcgacttaagaccccatcagttaccacccttcctcagtcatcatttgccttatttttatttttccagacccttctctgtgcagttgcatttcatacatgtgccagagctgatgaacagaacagagccaccaccccttctctgcaattctgaaacccaaacagctctgaaaatcaaaatatttttcctaactcgtatgatggcaaaaccaaaacctgccttcaggtatttatgggcgggtttattagagtcattgatgccagtaattgtgagtttatgttttcgtttctgcaaaaattcagtgtttggttttagctgctcacgacccagctgacagtgtaacgtaatacctatgtgtgccctacatggccttttacctcctaaagattctaaattccaagacatatctggccacagaggtttaggataaggagttaagtatggatctgtaattgtgttaaggtttgggcttcccttaaataaaatcataattctgtataccctgctgcaccttgctcttttcagacaccactgtaaatcaggaatctgtgttagcacttacagatttcacacattccttttcacggctgcatagtattccaaagcttggctacttgcgtttctttggctgagtgattcagtcatcctagtctttttctatcccgggcagcgttgcagtgggcatccttgggcacacctctctctgtgtgcacgtgcagtacaagaagcagaactgccaagtcacaaggttttgttttcacaacattgccatcatgtcagaagcacttccctgtactgtaaaatgcctcttctaaacttcattcttgatgactgcataatagtccattgtctgagtgttagtttcctgaggtggccataacaaagtcccacaaactgggtggcataaacagcagaaattgattgtctcacaggtctggagggtagaagtgcaaaatcaaggtattggcagggctggtttcctctcaggggtgtgaggaggactctggtccaggcctccctccttggcttctggtgttttgctggcaatctttgctactttttggctcatagaagtatcaccccagtcttgccttcatcttcacgtgatgttctacctgtgtgaaaatctgcgtccaaattttcattttttaggaggcacagacatattggattaggaccaaacctaatgacctcattttaactaattgcatctgtaaaatgaccccatttccaaacgaggtcacattctgagtctgaggtactagaggttaggacttcaacctaagaatttgaaggggacacagtgaaacacaaaacagtctgaatttgccagattttacttaatccgcttatactggccacttacgttgtttctactaccttatgaagcaccctatgacaaacatccttattcagaaatcttggtctacatttccaattattcctccagaaaccattccttagagtcagggggactgtccatttgtcaggctctgggtggcaccttgccaaattgccttccagaaagcagagtagggggatgcccacctggtcacacctgggcccttgtcttcattcacctgggctctcagatgactcctgcccagtgctccaggctgaagtcctctgcacatatgtgtgcgcctctgccagcatgtgcacaggcattgtttctatcaagtcacttttttatttctcattcctgccaaaaagagagagagtctacgggttaatagcaaagtagaaaccgtagctcaaaatgtctgtttggggcatgtactcttgcatctatatagatgaatagagatttcagaaatactgggccctctgggcctcaggcattaaatcaatcagtgcaatttcactcacagggcagcttgccaagggagcccaggagagagtagcgacttctctgatttagttcagtccgttaagctcatggcagcctgcaccagctcactgttgcaaaaggcaatcaagtaatgagtactcagccactttcggggggcgggggccggctggggaaggggctctctggagcctttcaaatggagccaacttttgatagctttttagggtagttctgagagctggagacgggtgaggaacccgggaagtgagagcttaattaacggaactacagagaatgaggcagcaaaggaatctctcagagaaccagggggttttgtgtgtgtgatgagcaaaaggatagaactaggtgcttgagtactgccggctaggaaccagcattgaacagcagatgcctaactcagcacagcaagggccagcttagcacagagaccagagagcaagatgcgcggaaggataaatttagcctgcatttcaggggaaaacatcgatctcaaatgtagtgctgtcttttaaaagaaagtggaagccttaggccggtcatctgggacaatttcacttgaacagctaaaagcccaggaaaaacgagtgctcataaccagctcatgctgctagcacacccacaagatcttccctctgcaggcgggcggctggtgtctgcatgggtctgacagatggtcctcctgctacccttatctgttcccaggaaaaggtgctgccttgttttctggagagatttggggtttctatttctgatcccaaatgttcatcttcatgaggaatgacggggggcccaagctctgtgtttgctcagctgctggtccaggacattgacatctggtgggttgcacctgtcagagcagggccagtgccaatcccctctgttgtctagaagctgagcaaaagacatcagttactggtgtctgtagatagggttgttttgtttgtttttaaccaggtcccctgtagcattcacacagcatcctgagcattgtttctacctggtcaaagctaagggcaccactgtggtcccaaataatagagcacctgtcctaatgacgttcccacaatctcgccagtcaggtggtgacggcatctttcctccagcctccctctgacactgctcccctgtgtcaaaggggaagaaagtccagtctgtcaatatttggggcactaatcatctgcgttcgggcgccaggggtcattgaaaggctgagacgcttccaggaattcatggctctaaaaccgtggggctgactggaaaggatctccagcgagggtatgaagaaagaaacccaaatctccactccaccccgaccccgcagcctctgagcattgtccattgtgtcttgggttcttgggaagaaatgaagtcaatgcacatagtgatgtgggcccaagttaataataaatgtagaggaaggagaaaggatgttcaatatttaaacatttcagagcgctgtgtttgtttgccagttactgccctccgcctgcttcctggatgggttctgtaaaacggagccttccttccccaactgtgcaattggcatctgacaccagcgatttacatagaaagggaaatggtgccttttctaggtagtccccgtgccagcaggactccttctcgttttctgttgcctttcttgaaggaagaggatgacaacatagaaactaaggtttttatgacccctggagcacttgtgaggagttgacagctttagggtcatgtccagagttgtcttaattttcccagatttgcttctttgaaactgtctcatattttaacataaatgttgtgctttggttcttacctctaacagattaaaaaggctaaacaatgaaacgtacagttgtgtttaagaaacgtcactctaagtatacatactagatacgttccttaaaagttgcctgtaatgcagaattctgtgaatcaattcctcctttcttcttgacgcacattatagaaaaggaaaagcattccttctgggggagggaaaaacatctgaccccaagacataataaaatcatgcttaagaatacagtaaactttaaagtctcttagttaaaggaaatcaatacttttatgatgaaatattaataatactaaaaaaataagtcaaaactacaaatgcataatagctagggtgatttttaatgttggacacattagctcagcatttgtgaggaggaacaaagggaaaagagagcaacctagcccatttgagaagcccttccggttcctaataagtcccctttttgtgggtcatctgtcaagaagacacacacctccccataagtgccaaccttatttctaagcattttgttgaagctaccgattttggaaatgaaaggatgaatgtagctggagagaggaacacacacaggtgtgtacacacgcacactcctgcacacacatgcgcagacagggcaaagagaaatggagaattggggaaagccatttatttgtttgaatacactgctggctgttccctccgtccccatcctccatgaattattctggtagggatctttaagagggatggacttagagtagattgaaccatatgaaatggctgtttctgtaggtcaagttagttgaatattggcagttgcatatggttcaagctcatccattcaactctctatcaaagaaatgcaaatagaatagtcatgtgtcttgaatgcagtgtaacatgaggtttttaagaatctagatgaaaataacttcatttttctcgtaaacgattttcatataaatcctttaaacctagatatttaaagttcctttagaaaggctctctcatgtctcactttgttaactcctaaaaccttcagtcataacagctaatgtgaggaagacttttgttttgtgttgcgttcttttctccaaagagctgggccatttcttttgctacatacccctttgtctaaagacacttacgaaaatgaaagtcccaggacaggcgtgggggctcacatctgtaatcccagcactttgggaggctgaggtgggcggatcacctgaggtcaggagttcgagaccagcctgaccaacatggtgaaaccccatttctactaaaaatacaaaaaaattagacaggtgtggtggcagttgcctataatcccagctacttgggaggctgaggtaagagaatcacttgaacctgggagtcggaggttgtagtgagctgagatcgtgccattgcactccagtctgggcaacagagcgggactccatctcaaaaataaataaataaataaaacccaccactacaaaaaacagaaaaattacccaggtgtggtggtgtgcacctgtagtcccagctacacgggaggctgaggtgggaggatcagctgagcctggcgaggtcaagagactgcagtgagccgggatcatgccactgcactccaggcttggtgacagagtgagaccctgtctccaaaaaaagagaagaaaatcccagttattgcctcattgggcccaagttccaggcaccgtaaattccagccgaggaatcaaaacagcgagtgctacctgaacatttagattgcgttaatgctttcatcctcacgaaccctgtaaggtgtggtggtgtcactctgctttagagtgacaacagtgctttagaggacacaggctcgtggggtgaacaggtcccctgctgtcacatgcccagagccacggcactctcctcaccaccgtatcctgtagccagagtaaaagtgacaagcctaaagccaagttgctgctcttcaggtttctcccctgcagatagcagaaggctcatgtccagccgtccggttagccatgtcccacaggtctgccagggcagacgtcaacagagccctgtccacttaacaacctcagctgtgggtttttgaagcttgttctgtgctgttatccatcacggcctttctgtggctccgcacatactccctgattctatctgactcacatagttccagatagtatcttcagttcttgttgtagatgatgtgtcatagaacgtcatcagccatcggtctggcctagccccaatctgttaaaacacacggtaggagagactttggtgaggtgacccagctgcagaagttaactaccccaccctgcaaagtcggagtcctggcgaacacaagcaaatggaatgggtccacaggcatggtgctctctgccttgggtgcatactaagtatgtgtcaacggcaggtgccttttgcagagaatcaagactaattccctggcccctttgtacagtgccacctcctagaacacacggagcaggccaaacatgtcagtgtaggatacacactgtacggcctccctgcttctggccaaaaaggtcaaaatggggctgatgggataagagacttgctggggaagaatctggcgctcctggccgggcatggtggctcatgcctgtaatcccagcactttgggaggccaagacggctggatcacctgaggtcaggagtttgagaccagcctggccaacatggtgaaacccatctctactaaaaatacaaaaacaaaaaaaattagtggagcatggtggcgcacacctgcagtcccagctacttgggaggctgaggcaggagaatcacttgaatgcgggaggcagaggttgctctgagccaggattgtgccactgcactccagcctgggtgacagagtgagactccatctcaaaaaaaaaaaaaaaaaaaacaactaatctgccactccttggccagccagaaccttggggggccatcctttgcaagcagggccatagtgacccaccctgctcctggtgcattcctgattctgctccagctggggtcagtgagcgcctgtgcctgggagtctcctgggtgctgtctaacccgccttcctcctgctgccgtttcagccctgctgactgccgcagtagagaggcagcccagatggccgctcccaagcttgctagtgccttggctgacagactgttgtggaggtctttgcttgctaatttacagacggtaataccagtggaagagggcaggggctgggcgaggcagggactgggtccttgggaatcaagcccagccctggcgaccttcagttctagaaatccaaagcaaggttgcaccactgcgagagattccaagatctggtccacctgtgtcccccatgtgccatccaaccctctgtggcctggataggtgctcatgtaagatgcacgcattcctcatattcacacagcccaaatgcccgcccccccccccacccaccccctgccggtagcaaaaggggcattagacttggcagccctcacaggcagaccttcacccgacagcaaaaacatttctaagggcacaattaggacacagagagaaagcaagatactgaaagaccattttttcttttctgcaggttttcaaggatagtgtttaaaatctgagaggatttatccatggataaagagctataggctaaaagactctgcaagttcccagctatttttgtatgttggacatgttatccgttgaaaagcaatcagaaataaaaagtatttaagcgttgtgaggtgcagcctagtcagtgatcagtgatgtgggggtcgcccatggtggcagctcaggcttggcccgggaggccatacgaacatcccttccccaggtgcctgatgtgtagacctgcgccctgggctggacaggaagtggcttcttcagcaccagtgcacaggaagaaaaccagatatcaccatttgggggcaagtccttcattgccccgaaagcacagagttttgtgcactgaaacagtaaatcatctgagacttattaaagggatactgaaaaggggtctctgtgcatatacctgaagctttcccaaacttcagggtcctagcagtgagggaggaaacttctggggccccccaaggctcctgcaggcccttggagtcactgctatctgaaccctgcccacatgtcagtgaatgcttttgtttctctttggtttttgtgtagattcctaagaggagtcccgggcaaggacccaggcctcacctggcccatgtcggtgtgctgttgctagacttgaatctgaaccctgcttcctcagcccccaacacgtgctctttgagcagccgtgggtagtttgggccctgtgccctgtcttcctaaggtggctttcctagggtagccccccactgagtagctcctagcccccgcctgccctcgggtattgctgtcatcttgccagggtgtaggatccagagctgcttcttgagtcagaagcacgaacaagaaggttctatgtcacctgcagatctttctagtaagccgcaatctgtccagagccaccagcagctgaagtcccagacttagtcacctcccagccccccatctctcgccccagggacctggcaggctgcactgggaggtgaaagggcagatccaaggaaggagccgacaaggggagaaataaggccatgcacacttgctgtcttcagtttgtgtgcgaggtcacagggccgattgatttttttttactgtttcccagcatcgtgatgggtggtgagaaaatatgaacactgcatcgtcagaaacctgagccacagcctcggaatgaatttgctaatgaaaggcaagctcagggcacccacgcctcatggtcctcattcacggcagagactgtggaaaatgcacgggttgcttctcccgaatcagccctcagcgggttttatattatgctttgcaatctgcaacaaccataaataagtgtaggtttttcttagggcaggcagctctcctgtccaaatcttagagctttttcctaaaagaggtctattgaaaactggacttctttgacacacctctaactgagatttaaatgtcttagtctcatacctcagactcaaaagccccccacctccagagtttggtcaaggaggccccaaggtatgacagacaccctggggttaaaaacagaggctggagaccgggagcagtggctcacacctgtaatcccaggactttgggaggccgagggaagaggatcactttaggtcaggagttcgaggccagcctgcccaacttggtgacccatctctactaaaaatacaaaaattagctgggcatggtggtgcatgcctgtagtcccagctacttgggagactgaggcaggagaattgcttgaacctgggaggcggaggttacagggagccaagatcgtgccactgcactctagcctgggtgacagagcgagactccagctcaggggaaaaaaaaaaaacagaggctggagacccctctggttgcatacaaacggttcacaagatagatggcctggcttcgctggcttggggtttcccacttcttaattttcaaaaggagtatgaatgaagctgtcaacattttcaaaatcaggaggtgttatgtcaaaatccagatatccagcttctcttgacaaactggagactgcggccatactgaggtccatgttctcctgcagcagcagttagaagaagctggaatctgtgctttctgatttgccccagtctctaccaggccctgccatctccctggcacaaaagctgaatgtcccatggactgcatgtattagcatgcctgcactgttgttttaatagaagagaatggtttctcagtgtgcgtgtgtctattaaataaagggaaacagatgacagatagagaggaccaccagtgttttatctccagcccctcctcattacattaccgggctggccagccttgccctgtctgattttcaaaagtaggatccacagaagtgtctagaaaggggaggggaaggccctccttggtaaggcaccatgccagcccgagcagttccattttcatctcatgtataaattggagtttcaccatttagaaaaaatgtttgaaaagggctgtcatagggcgttatctttgaggaatgaggttccatctgcagtcaggcagttgtatctcccattaagctgctttcaaagacatgccccaggagggtttcatgggacagaaaccttgtgggtgaattggtgtgtcgtgtagatcgcctgtttttttccctgtggtcttagctcctaggaagctcagagttaaatggtgacattagcttcccatagcttgaagtctttctgatataacttttcaccttctattgtcgggttcttatttactttttgttttagtagctttcagtatttagtatctatggcatttaggcttgggttttaaaatataacataagccatctcaaacccttcctggaaacaggtagtatgtaagggcatctgtagggaatgaggctgcagggcgaggttagtgcttttgagttgagtggagaatccccaaattgaattcagagccaactgggttccttccctttcagctccctaaaaggttcctgtggaatcccctataatctcaggtagttttcacatcttccaagggtagatttttttttaagcctgaaatagttgcactttagtcacatggccagtatcctcagagtaattaccaagtgcaaagcggcaccaactccaggcaggccacagaggtcggggggcgtccctgctcatttggagattcagaaaacttttggtgcaagcccactagtttttgtgcctacacacatccaagcccttcccaccctttagtctctctcgggcctcgctctttctgggtcttaacaattgtgtgtaatctctgtgaccaggtgtgaacccagacaaaaactcggtcccatctctggtttctacccaaaaagtccacttgcaccacatgggaaagagttgaccaagtgtttcataaaccctaggtggcgggtcacctccccacctcacttgcccctttccctctttcccttcagcccaccacacctagattccacccagcaggtacagggcagctttttctgcaccaaaaactctgggagccagcccgtcccttgtccctaggggacttaactcacatccccgcattaacaaagttttttccctaactgtatcagttaagattaagttcaactacatagtaaagataaactcaaaggggaagttaatttccctctcgggtaaaagaagccttgtagtcaagagatacacaaagacgtcagggacccaaactccttccttttcagtgctctgctgtccctaatgtgtgattcatcctcatagctcagggcagctgctgtagttccagccattgcatccattttccaggaagcagaatggaggaggatataccccctttccttttaaagagctttccaggaaatcccacatgccacattcatttctatctcactggtcacaacttagtcacttggccacgactagcttctgggttctgtaactgcaaccgaaagggagaatggttattgagagacagcttacaatatcaagaacactgtccaaaaccctcttctttttgcttttttgttttaagccttcccaataaagtgaacaaaaccctcttaacctagaggattccaggtgctagctattaatgtaatgataatcatcacactaaatacctaaacatctttgcagtcaaatttcttatgccctgcttaggtaggccgactcctacacagccatcaaggccccaaggttggacagagctgctgcagaagcacaggggagagaatagttaaccctaccttatgcaaagactcctcccaggctaatgctgagctgcgtgagccatgaagaatggggcaggggtttgtaaagacagaaaagaagcaaaacagaactccagaccgagggaacggcctagcaaaggttgagagcaagtggttcttggtaggaggtctgaggactgacctaggctgctggaggcagatcgccatatttccacatccccactcctatgcacacccagtgattctggggttgtaggagggccttgactcgaaagatatctgggggttccagcttccctgagtcctatggatttgaccaacaatctaggcataaagagcagagattatcaactcaaacgcccacacggccaggcaagttgcaagagcagggacccagctctgctcatctctctcccgttgctgtcctgcaggaatggggccccataaagccagatcttttcattttttaagaaagcagaaatccaggtctgtgtgtaaaagctcccaacgtgtccatggtggtacctccaacaaacacacatataacataaataagcaaagcgaaactcgtgtgcaagcccctaggcggctgctggccggctctgaatcttgaatcacatggttaagtgattattggtggggaaagcttaaagacctgtagaagaggaggaggggggcatgtccaaggtctcgaagtcagtttgggcagagcttggactcaaacctggggttctgactccaagcccagctttccttctgtcagtgggcctaaaaatagaagactgaccttttcttggtatttttgtgcttcacaaatgccagagcgttattcattagttcatcttcccaaaataactggcagaacacggccagagggcaacaggaagactctgggctgcgccccccgaccatgaaactgggggctcctgggaagtgggggatgtgtctcaccatgggcatagtttccccccactgttggagtggcctgcctggccctgctcttggtgagtccaggggagagagcttcagagggcagaacagatctcaggaggatgttaggatcgggagcttgagtctatccagttcccaggcagtttgtgttccctccatcatcctcccttttttttctctttttggtttaaaataaggtttacaataggagtcttggaaaattcagacaagcacaaaaaataacaaaactcactgcagtacaactacctgcttctctcactgtgtcagcttcaaatctccagctgccttctctgctctggacaagggggaaagagagcacaaattttttgcaagagcggaaacatatgggacatgctttttctaaccttttttcattgactccatcttgagcatttcccccaacacttagtcttctcttaccagcgtgttggttggcagcagggaatttcatcatgtagagggattagaattcacttagcctttccccagttcttggacttatcagctgtcttctgttctctgttctgcacaccaatatgctgaatatccttgtagttcggtatgtgcatccacccacagtgtcgtctgcagcatgggatgctgcaggtgtggaattggtcagatggtgtgaaagtccatgcagcctctgatacacattttgcaggctgtccttgaagcatacccagggagagccaagactgttatcactggagaggatctcagggaggccggtttgccttcactcctgtcgcacgatctctggcttgtctgtgtgtttgcacctacttcgcagcccaagtgtgtttgattcatacaccaaaagcctctggcacctctgccaaagctagttcatcagggactgcctgactgggatgaagcaggaaccagaggacagggcgctctggccatagacattcaccctgaattctccccagcaccctcctgattctctgatgtgttgccgctttgatttggggaaaagccccttgaaattgcaggtggggggccttggccatccagcaaaataaaggaaaaaaaaagccaaaagtcactgtggctttctggtctcagtgccactggcaaagggagagagagtggaaaggagggaagtgggagttttagtagaagtgggtgagggagagatgtgttcagtaacctctgctcagctagaccctgcaaatggatgggatcagtagttggtgatttttttgtttgtttgtttaactcagtacatgcagattttactgccaatctatgacttgatcccaacccattcccaaaataaaagaatttaagcatcctgactgcagtgccagcttctcatctgctaccctacatgtcccactgcagatgtcttttgataataaaccaggtttatgatgctgtaataaaccatggctttaaagagggcaagagaaaagacgtgtcttcttcaaatgggcctgtgaccaccttggcaacggctatgtcattgatcccttccagccggggtcattgtcgggagcatacaaggtgtaatcccaactctgttactacactggctggccctctgttcatggccctgataaataggcagctcgggaaaagccatcttgacattttgatttgttaaggggtaattcattttcgaggcaagtaaacagcttgtaaactggggggtttaccgctctaagtgattaagaagtgagcagctataaaactggttccatgaggctgcggctgagtgtccccaaggaatcttcctgcccagtgtttggatttgccggatgtttgccatagttcatctgagcgggcccccgacacacacacacacaatatatcacattgtgcctcttcctgagaactccagctacattcatcctgcctttctctccgcaagcagacctctgcggtaggtgcgggcaggaaataccctccacgcaagaggagctggtgctcaggatgaccgcctcactcggagactcaccctgctttcactgggccccatgcacttgccattatagtcagcgcttgttaagtcacccccaaaacccaactgggggtataaatagggcccttgccttttaaggagctgatctttagacgaaaacagcttcacatgaacctgagtggaaatagcccctccttgatggcccggagaagagtcctgctaagccctaagctgagccgcaggtcccatctgtaggtgaaaggaaggaggctgagggacatcagggacttgcccaaggtccctcagctgggaagtgagcagaggagggttaaatcccaggcttccctggtgccataacctgggtgtcatcccctgcaccagatgggcacactgcttctgtccagagccaggtaacctggcaaaaaagccttttaggctttgcaggccatgtggtcgctatggcaactgctcaactctgccgctgatcgagaaagcagccatagtctctgtaaacaaaggaccgtggcttgttccagtaaaactttacttaccaagcaggcagcaggttgcaggatgccaacccctgctaacaccctgcagccttcctgagtttcaagaaaggtgaggtcagggcctagagggccttctggaagtagtgttagtagagagctggaccgtgtgaagttcaggcagggcaggtggcatgaatggggtccagggctggctgtggtgaatgcattcgcttgaggagtgggaaggctgcgggagtgaccaagagggttgagatcccctctctcagctggaaggaggactcgcccccccatatctccaccgcaatttggggctgcttctgtgccacgaagcaccatcaccatgggtcctgcttggctcctaggggctgaagtcgtggcctgcagaaaagcacatgtccaccagaagaggggctcctgggccggataaaaggggctttgatttatcgtaaagaacacgtatcggccaggtgtggtgacacacacctgtaatcccagaactttgggaggctgaagcaggaggatcacttgagtccaggagttcaagaccagcctgggcaatacagtgggacccccatctctaccaaaaaaaaaaaaattatttgggtatggtggcatatccctgtagtcccagctgctcaagaggctgaggcaggaagatcacttgagcctgggagctcaaggctgcagtgagctgagatcacaccgctgcactccaggctgggcaacagagtgaaaccctatcgcaaaaaaacataaagaacaaacatgtatactgagctctcaccatgtgccacaccctgttctggggtgtgataatagttctttcattttattcccacaacagtgggagtatgtagtgatactccaggttgtggctgggaaagactcaagagaaacacaatagctgttcaagtgtctggtgcttctgtgtgggaaacaggggtgcacccaggtctgagtgtctccaagatgaggggctcgttcatccccgctgggtcagtttaccgcagaaacgtgtgggcagactccacctccaggtcccggagatgctgagggccatttgagaccatcatcactagctctttgccagggctttcgttgttcctgaacctgacttccctagaacctcaagggcagagcaaattctctggaaggagcgtccagggcactgtcctcctgcccgggtgtgacttcagagcgtgggtcccccaggtatgacttcagagcatgggtccggtgcccttccttggacaccatcagcagaagcctgagactctaccatgagggcatctagcatccctgggtgaacttgccacgaggctgcacgtccctcttcaagggcacagctggcacgctgctgagccagtatcaggcactcggatttacgactcatggccccacactcagctctgtggctggttgtactctgttccttgaaataaacctgtaataaaccttttccttgaaatagcttcaaaatgtggctgggtcagggccacgaccagtgaggtcagcctgttccagggaacagagcaggactttcaaggaactgaggttgggttgttcagtggaaccatgacattgaggccctcaggcctactctttgcttccacttggtcacctggtactttgtcttgcaggcttcgccgtggcccagtgcataaaccagcacagctccccgtccctgtcctcacagtcgccaccctccgccagcgggagccccagcggcagcgggagcaccagccactgcgactctggaggcaccagctcgtcctccaccccctccacagcccagagtccagcaggtattggccacgtgactcagtgatatggggacatttggagaaccccgtgatccctcaccattaccaaaacccctgacctccaggtcctccttgtcacagcacttgaaggatgctgccgctcaggtgatctgcacatgaagcctctagagattcctctaacttgatgttccctcccaggctgggtcagctcccagatggggaagaattgctcctttttcaggccggtccccaccgaagctgtcactgactgcagagctgatgggcagcaggcgggctgcacctaaacccaccctatcatcacctccacagtcttaggtgtcacaaggaggggtctcccaaggggattgtttgcagtctaggaaaagaatcgcgttcctgctgattttttttttcctctgtaacataccagttttgtccttaaatgtggtgcggtccagttgttcgagtaggcacgcactttgccactctttggtaggatgtgatgaagtcgtatcttgccatccttcaacttattccacttcagacatggcacagagggaacccgggagtgaatgggagcccctggagtcagcctggaatgggacatgcaccagctcctcgttctcggctgccgtgagctattcgctgtgtgagatgtggggaagtacagacaccaggcctctggcacaacatggccccaaattgtagccagaggagcagggatgagcatccatggccttgagccagcaggatgttctgtgccccagcagcatccccccgccatgggtcggggggtcacaccaactgcctgcacctctgactggagatccttagtatccttcactgttcctgcaagttcccctccagagccctcactcatcatatttcaggggcacgtggcccacctctcattgagttctggattgattgatcatggcaggaggacacgggctactgcagagccagggaggtcgagggcccttggtcaccatcctctcagcaccaggagccaagatctccctgggcacctacacctctctcttgggcacttccagcttttgcatttccagttcatgcctgtggctcagagcaccccaacccacctgtgtctctcccatccacacacaatgttacctgcacttcatattgacttcacgaggcccaggcaggaaagtcaccccacagccacctcactgagagatcctcttccactcggcacctgctccagggcatgaccaccccttctgagctatttctgagcccaatttaaggttggctgcacatccaagcagatgccacccctgttgccaggcttgtagctgggaaactccagcagagcttctttcagaaactaagacgcaccctcagtagccctcttgatcccgtttcatgcttgctcaggggcgggcatgcagggttgtgtgttcatgcaccccaacgcacatatttaccgttgcactggggatgaaagcttccttgcccttgtagctgtggtcacctttctgtcatttttaaggacgtacagccaacagctaagtgaacaaacagccatatacttctttgcctaaagttaacaccggcaaagacccacagtatcaaaaatgatcaaaaatgggcttctgtatatggatgtctacctgaatgtgacccctgaggcttcaactctgcactttcccagggcctggtgtctgcagtgtgtgctagtttcttttttcttggcctccctcagcccctctgtccctacccccaccatcccctgcatggtaccagcgtaatgtcttctcatctcagaaatccagtggctattaacttggctgtcaggtggccaggcagttccagtcaataagtgagagtcaggacctccgaggtgtctgctcccatttggtgcgtccccagcaggcctgcggagacaagtgtgtaggtccccattctttatgcagcatgacagtaaaagcctgaggcccagcctgcctgtctggctctgcagacactgagacaactcacctgatgaagggccatgcccggtgggcagcctgggctttactcttacagatgcctcaggatgcagctattgatccctggcaggagagctcatcagagcccacaagctcctccctgtcttgaggccagacttctaggccagcctgcaatctccctcccagtccacccagaccaaagcatatgggcttcccatgttccttgtagggatgggcctaaccagatggctccaacatctgcctgctgttccagcaagccgcagaggagagaaagccaaggacaggagaagggagacagctttgttgggataggagcccttctgccagttgcttgatttgacattggctcagagtgcgactcagcattcaggcttctgatgagggaaggtcaccctgcatggctcgctcacccaactttccacccaccagggacctggccctgatccaccagagatgatatccttggagggccagccaggcagcggggtgggccagggcctctcctccaagctcattcatcctaaccgcccactgccttcagcctggacagcagaagacagctgcagccccctacaaggggcagcatgtcctcaaagtggtttttgagggtacagtgctaagtcagaggcgatcccgtctctgtgattatggagcctcccagagtccaggaagctcccttttgtagagagcggctgccagaccctccgaagtcagaactaggaaaccccagtggcttctttgccattgatttgttttttgttttgttttgtttttttgagacagagtcttgcttagttgcccaggctgaagtgcagtgtcgcagtctcggctcactgcaacctccacctcccagattcaagcaattctctcacctcagcctcctgagtagctgggattacaggtgcgcaccaccatgcccaactaatttttgtatttttagtagagatggggtttcaccatgttggccaggctggtcttgaactactgacctcaagtgatccacccacctcagcctcccaaagtgctggcattacaggcatgagccatcacgcctggccctcctttgcacactttgcatggccaggtgtttggctgggcaagtacacaagatatgccatcccccaagtgatgagacaggcccagttttccatagctctagcccacggttttgaacacttgaattgttcaaggatgttgttaaaagctgggagtgaccttcatgctgttttgacagttggtgtggcccaggcacccaccaatcagcctaggctcctgctgtagccacggcagggccttctcagtgtgcacctgctgtgtggcgtcccagtagatactcctcctgaaattgagcccacctgtgccagacaccatgcttataggcacttcacagatgtccccttgttgaatcctgccacactccgcctcacattgtacagtagaaaacacaggggcccagaaaggctgtgcaacttggcccagaggatgcagctagccagcagaggagccaggatctgaagcctagccttggcagccctaaagcccatgccagcagaatatccgatgcggtttccaagactgtctcaggcacctccagggtgtcgcagagacccgggccccgatctggatcctggttggaggcagcccatgaagtatgtttctccttccaacgtgcgtggctgctctagggcccaagtgaaaagtcacggccccactcgtgaaggcctgctaacatgtacaaccccagccagcagaaggctgggtggtgtgaacccctgggggaggaaggcctggtgctttcctaaaatcagcagcaaagtggaccccagggagcccacgtgggttcatcccacatgaggcagtgaaaccagctgatgctcagttgggttttccgcctccagcctgcgtccagctcaggggaccttagatttcctgcctgagtttgaaaactctccacatttatcccaaacacgttctcaccttcccgtggggacctcagcctggctcccaggatttaggctcaggctgtcctcttggttttgtggacttgagacctgatccaagagatctctccacccgcccggcccacacgtggccttccaacctcttagtggctcatctccctgcatcttatcttccctgggtttgggcaccccactccctgtctcagtgaattattgttttccaagcaagcaggattaggataagtccctactgtgcacagcattcaggatacaatgtggcaaaaagcatgatcttgcaggcaggcggggtggctgaggcctatcaggtggccacccagaggcatgtgcagttacaaaccgtgacaaaggaaaggtgcagcaggttctgacagccgatgcagaacagtgcgggaggctcccagaggtggcatcgctgcagatgacagccgggggatgaggggttggtgaggccctggtccgtgaggaaggtggcctttgggtctcacatgaggccaccagggtcccaaaccacatctcctagagaccagtggattccttttgcccatctccctggggtctgcctgtacattctgtcttcccaaatgcagacgggccgtgggcaggggggaggacacttttgaggaacattccccatgcccatcagggccgcggcctatagcccagcggtagcttcaggcccagtacaggtgagggcctctcagctggaagggggaaggggacagccccgaggggtcactgactccctggtcacccggaggctccctccgtgtgcagcacctgcctctgagcctccttcgcacgccagaggcagagctatgggtgccctggagtggctctttcagtgctggccccagaccaaagggagagtcaacaccgaactccctgatgacccgagcaactgtgccccagggcactttaatggccagtccttttgagaagtgtggtgagatcctccagtgctctgtggggagagcccgacaccctccccacgaagtgtccaggagccaggcatcttgtcgcccacacatccagcagagctatcctggcaggcctcagccagcccctagtgagaaaattgcagggttggaatcagcattttttccccttaaacattttatggttttgagaagctgaacttgcaaagaatatacagcgggaaagtgaaaaaagacccaattttagaaccacatgtggggccacaggaaaacgttagaaatatcttctggtataccactgtgcacccacacagtgacacttctgcatacacacagtcacacatgccaatgcgcatgttcatacagccacacatacaaatgtgcatgcatagtcacactcccacacagtcacacacatgccagggcacatacacactcacacatacaaatgtgcatacatagtcacacacaccagtacacatacacactcacacatacaagtgtgcatgcatagtcacactcccacacatacacaatcacacacataccagggcatacacacactcacacttacaaatgtgcatgcatagtcacactcccacacacatacatgcacacagtcacacacatgccactgcacatgctcacatacacaaatttgcatgcatagtcacacacacatacacagtcacacatgccactgcacatgctcacacagtcacacatatacaaatggacttacatagtcacactcacatacacagccacattcacatacatgcacacactcatacagtcacacgcatacaaatgtatgtacgtggtcacacacacatacctgcacctacacatacacactcacacatagatgcacacagtcacatacacacacacactctgagtgagatgccgataggaaaaccatctcctcagataagaactctgacctacagtgagttccttaaatagcccactcacacctctgagctccagattagttggagttcacatacattccaagtgaactaccttggggaagacagaaaactgtttgatcaaaaatgaggacagtgtgaatgtcagcctgcttatttatttatttttaatttgggggagcacatagtaggtgtaattaaacattcatttttaaaaaacaaaaacggccaagtgcagtggctcatgcctgtaattccagcactttgggaggctgaggcgggtggatcatgtgaggtcaggagttcgagaccagcctggccaacatggtgaacccccatctctactaaaaatacaaaaattagccaggcgtggtggtaggcgtctgtaatcccagctactcgggaggctgaggcagaagaattgcttgaacccgggaggcagaggttgcagtgagccgagatcatgccactgtactccagcctgggcaacagagcgggactctgtctcaaaacaaacaaacaaacaaaaccacattgggttatgagtcatggccaccttgattgtcccctgaggttttatagaaagaaagacaggtctggctgctgttgacggcccagtgcagggagcttccccggcttccctcccatctggacccacccctgtgcctgtgtccaagagagcccccttcaccccaccacacctcccatttgggccaactgagagtcagatgacctgaaacccacccacatgccactcaactcggtcaccactgtcccgctggagttttaaggacagaaaccccaagtaagatatcgtcccttttctcagttttctctgtggcatcatccttttttattgtggtaacatacgggtaacataaactaccattttcgccgtttttcagtgtatagtccagtggcatctaaggaccttcacattgtagtgctctatggcgtcacattcaagctgtgtgctcacccgccttcatctccgagagtgtggtttctcccttcgcagtgagatgctcccgacgtttttatttcagccaattagaagccccactcggccacctggcacctggtctccgctctcctgctgtggttcagtcttgattttcaaaggcacgggtcaccaagtcgctgcccagttaggtggctgagggagaggctcgtggagaggctcgtggagcgcctcgagcatctgagctttctcaggactcggagctgtgctgttggcgtcagcgtgtgacaccaagaacctcctcacttggggtcagaaatctgcttgattcacttagctggtttgatgccagtcctccagccacacaccctgccctcctcacactgtcctgaggatgccgggttttcgtgtcctgactcctgggccatgtctaaaactgacaggtgattctgttcttccgtcccctgaggcttccgaccaagaccagatgttgcggatgaacccatctttcctttccaacaggactccaccttctctgcccctaacccggttaagttgcacgagtgaacaatttggttctcagcgatcccgaccctgcctcatcctgggggttgcatggggggtgtcttctctgcatggggggccagcgccccatgcaccggtggccacaagcccatgctgggcactgccccacgaccctcgcccctcgtcagtgctcagcgtccgctgctgctcagtgtcccctccatgtcgcctctgccgtcccattgttaaaggctttctatgatctgtcgctgtgttttccctctagtcaggagtggcaggaaaggacgccgacgagtgttcagcctgtcggaggccgacagtcatggcggccactgggtttagtgctccgaacggcagctgccacggcacctcacgcacagtcaattcaggcaggtctcccctgtgagccgctcgggccgcgacgtccactcgccacgctgcatttccacagtcggcagggtccgcgctggcaaggtgggccaagctgggcctgagcacagagccatttgccaaggcggcacttccccattttcccccaaagttggttctccctgctccctgtctggcctcacctcatgtgaagaccagatccccggcccttgaccttcgcgacagtccttcaccttcgcgacagtccttctgagccagacctgtacagcctggaaacgctgtccttctctgtgacgtgtgcaccagtgtcaggctcggcccgggccagaagcagatgctcctgccaagtcccccaggggtccccccagtttaggccatgggggttgggcggcagttggctggcaaagtgagaatttgtagaaagcaaccaagaagtctcctcatttcttttttcctttcttcccctagtcttgatctaagataagtggcaaattcagtcctgttttgaccggaagccaagagccatttccctcatagacacatggatggatgtggccccaccatctccctttctgagtggcacccacacagcagtgaggctgatccatgggccaccacccagcagcctggctcgctgtcggggccatccctgctgcctcccctatgacgcttcttctgtggtttctgatgcgcttttctccattggccgttgcgcttgtctgctgggagcctttgccttcttttgtgttgaaatcctattttctctgagctttgccctccacttgctctacaggtaccatccttttcttccccacaacactcagccccaccttttcccagcccagcacaacaaatccaagtttttgctggaagtcaccatttgcttgacaaggatgtgttaaggccccaccctaggcctgcagatcagtttctgaggtgctggccaggcacatgggggacctgctgccttggtgtcctcactggccacagccacgggatgtctgtccgctgcttatggaaacgtggccttcctgaatgtcccattaccccctcggctctgtctccccagcccgtggccaggaagtcagacttttctccaaatccctcatttcctgagcctggcctcaacttgtggccctagagttcaaaaacaccagcaggcatgaagccaaggcttcaccagtaacttttgcagctcagcacttgactagaaaaaagtgtcctcactgggtaattttccccccaatgaaaacctggcagagttctcctttttcacctgccttggttggatacccttgtagatcaagttcaggaagcagttcttaaacaacaacaaggccatgtcataggtgatgggtaagaagaggttattttttccctatttaaaaagaggctacttttagcggggaaaccaacccttttaataaaaattgttggtccttttcctgaagaagaaatcagttctgtgcgcatgctattgttagttggtttgctctttttgatatatttgcctacaaggtttccacatccctgattattctcataaccaaacaccccattaaggagcagggaacgaagttggccagcttctttgaatatctgcatgcaaatgcagacttgagcaaagagagaaaacacttacatcgaaattttaagaaaacgtgaaggtaacgcttggctactttgtctccagatggtaggacagtgccatttggggaattagtcatttctaaactgcctcctcagcagcaaaatttatgtgtggatccacatgtgtgtgagtttgtcacaggtctgctcatgcccattcgaagcaagggcagaggccaccagagcaggtgagcactgctcagggaaccacaggttctgaggaacagcaggcagatcgtgctaggtcagggcgcacgcctgagctgaaaccagcccagcaccgcaagccatccttactgaatggagcaaatcagttgaaattcaaagaaaccagaattcgcatgtagtgtttactcagcatttctgggctcagatcacacctcaaatcactttttccactagtgttcaccgatgcccattgccaccctcccagagcgaggaccaaagcctcatgcagtggtttcctctagatctctctctctctctctctcttttaaaaaagacattaggaagaaattaattgggctgggcacggtggttcacacctgtgcacatcccagcactttaagaggccaaagcagaaggattgcttgagcccaggagttccataccagcctgggcaacgtaatgagaccccgtctctacaaaaaactttaaaaattagccaggtgtggtgacacgggcctgtagtcccagctactcaggaggccgaagcaggaggatcacttgagtccagaaggttgaggctgcagtgagctatgatcatgccactgcactccagcctgggtgacagagtgagaccctgtctcaaaaaaacaaaagaaatgaaatgaattgtgaccttttagagttcatcttgcccagagtcttgtggggagaaatgccggtgtgtgctttgaaatccagtctgtctctcgtgctttcgctccgtgatgggagctctcttcctctccctcttccctttctatatgctgcctgcttttatttcgttctttgtttttccattattttgctttatgttccatttgctcttctgttttattttggcctgacttaaaagagaaaataaaaaactaaactggaatcacgttgaacaaaaaaaaattctaccatgcttcccgggtcccaggctgctgtcagactcttagctcgatatagcatcgtcagcacctcccgccatggcttggggacccccagctctgtgcaaatgagaatttgcctccaagcaggatgcccactgtcttcttctcaatgtttttaaacacccggcatctgaagtgctggaagatgttttccacaatgaattccagctgcatctggtgtttctgttcaggcaggctcatcactggaaggcaaatgggccagcatgtgtctgtaggattttgaaaagggccgggcacggtggctcatgcctgtaatcccagcactttgggaggccgaggcgggcggatcacttgaggtcaggagtttgaaaccagcctggccaacatggtgaaacctcatctctacaaaaatacaaaaattagccggatgtggtggcagatgcctgtaatcacagctactcgggaggctgaggcacgagaatcacttgaccccgggaggtggaagttgcagagagccaagatcatgccactgcactccagcctgggcaacagagtgagactccgccaaaagaaaaaaaaaaaaaaaagcaccaaggaaagaaattgctgctccaagaataactgcgttgggtggaacctcacctgccttgtcctggcgtggtttctcagtggcccctgccgggaagctcgggacaataatggcctgaggaaccacagcagccccttggtgggtgctggctcagcactttgaggaggaggaggaggagacaggccaaggttttgttttggttttgcaagctgaaaagttctacagaatttcctttttttttttttttaatattgcagtgggttccctcttgggtaaatgtcatcaaatgtatactctggaaatggcctgatattacgagcacacccaagcccatttacttcccaaacaagtatttatcatcaggcaggcctgagatttgcccacacataaagcctgtcagctgggtctctgcacccaggaactgtgctttcataagccacatgctgattttgcacaggccctgaattttcccctcatatcacaagtcagggtaaccctaggccctgctgtattttccccaggcctaagtcagactggattttgcaggttctgtgtccccaaaaggagtgagtggagccacgctgagccctcacgccagccagccacctcccacctagctcaccagggccgcggttcaggatgggagcacagggcgcagtgcgacggggtgtctcaagggctcagtgtgtttccggtttttctcccccaatccagatgcccccatgagtccagaactgcctaagcctcaccttcctgaccagttggtaatcgtcaacgaaacggaagcagactctaagcccagcaagaacgtggccaggagcgcagccgtggagacagccagcctgtcccccagcctcgtccctgcccggcagcccaccatttccctgctctgcgaggacacggctgacacgctgagcgtcgaatcgctgacccttgtccccccagttgacccccacagcctccgcagcctcaccggcatgcccccgctgtccacgccggctgccgcctgcacagagcccgtgggcgaagaggctgcatgtgctgagcctgtgggcaccgctgaggactgagtcagtgccggggcctccctttgtgtgtgtggccccgctggtagggaccccagtgccgctgactggcaagacacactgggagcacccaccattctgtgcggcccccagcagccatctcaaccacctatccctgcgctcccttgaatgggaagaagccccacgttgtccttgaattcctttttcactttgcatctcttcacgtgcaggctgggaccagcggagacaccgcggcgaatgcagatgactgcaccggccactcagggagctgcctgggctccgtgtctctgagccccgggtggcaggacccaccggcacctctttcttcctctgtcatatggctcctctgtcaccagccccagtgtgcacagaagaattggaccaggtcactgtacgtagaaatttgtagaaaagcagacttagataaacatctcctttggatatttatttccgcttttggcagcaggtgaacatttatttttaaaacttctatttaaaagaagtccaaaaacatcaacactaaggtttgatgtcatgtgaaaagtgtaataataacagttaagatttcatgatcattttcactggacctttcctgatattttgtttcagagttcttagtgtggctttttccatttatttaagtgattctttgttactcactaactctgcaagcctgtggaataatgaagtaccttcctggaaagtttggattattttttaaacaaaaacaagggagatacatgtattctcaggtacacacagagctgagagggctgaatggttttctgctatagcagccgagaggcctcccatcatggaaagatttctccaggaaaaggaggaatgtagccagctccccactcaggacgcttcctcatttctcttcaccaaaaccaaacagagacagcttccagcaccttcttcagtgttaccatctctaagaaggaaccagttgggaccgtgaagactcccgaccctgtggccatgatggaaatcaaaggaagacaccctctacgtcacctgccctcgactgtgtgtgcccacatgtgccgagagatggcccagagccagttcccctccagctgcaagggcatggtgtccccagagctctgagtctgtcactctccctctgctactgctgctgatctgaatatggaaaccccatggttcccttccccattcggactgggtgtgtacaagcaaggacccagatgcatcagacacagcccccaagatgttcctttctactcggccagctcgggagccagacacagcactcacagcccaggccgtgatccaccctccccaagtccaccagggccagcggcccctcacctctctggtcactggtgagaccttccacaactttcctccagacctgccagcagatgtgcccaccaggggcattaggtatccgccggagcctggccatagggtagtctcgggagccgcgctgagatcttttgccacctgcattttagaagaacatggtctctgtctcctcggcccagccagctgtcccggcaaggcctgccgagggcagttttcaacctcatgaaggaaacacagtcctgccaaggagggggagtggcgcccatggggacaggcctcagtccttagaagccctctgggtagctgtgcccacccagccttcatggctgcaggtacaaggacctttgcttccatagagaaaacgcacagctcagaaagggggccacatgggcagaaacccaaaggaaggacaaaccacgaccaccgtggccatctgcagaatccctggaagagaaggaaggcagggtggagcggggggaagaccatcatggagagaaggaccacagcatcaggagacgggacacgccacacccagcaggcagcctgtgtgttgcttaattttttaagagcaagaggggtagagaggatcaagctggccctggctggagatggctagcccctgagacatgcacttctggttttgaaatgactctgtctgtggggcagcagaaactagagaaggcaagtggctgccccaccccaaggcgtgaccaggaggaacagcctgcagctcactccatgccacacgggtgggccaccagcctgctgtcagaagtctctgggctccaactggtcttgtaaccactgagcactgaaggagagaggtcttggtcagggctggacagcatgcccgggaggaccagcagaggattaaaggtgactgggaggaccagcggaggataaaagacactgctcagggcagggcttctaccctgcatccctggccaagaaaagggcagtccccatgtgggcttgcagggtcactctcaggggcctctttcagctggggctggcaacttgcgtctgggggacacctccaggtgtgtggggtgaggatttcctataaccagggctcccagaagctttgcttatgtaaggaggtctgggagccagcccattggaggccaccagccattttggcttcaaaggaccccacctcacccaggtctcagcggcagtgggcacagctatgtcttcaggagctcccgtcaaacctcatagctggggcgctcccagacaggccagtccagacaggacacgctgggcccctggcatccagaggaagagccaggagtgtgggaaggcccacagtgggggctgtggcttctgacactcaggtcatagcctcagaggtctgaggtcagcccccacagacccatccggcccgccccccaagtccctgcagagagcacttagagttatggcccaggccctggtccacccttcccctgtgcacctccggctgggtttgccaagtcagggagcagggctggccgcaggaactcccaaaccttggctttgaatattgttgtggaggtgtgctcgtccctttctggacgtgcaaggtacctgtcccagcaggtcagatggggccagctgaggcgctcccccaggcaggaagggccagccttcaccatcgcgtgggattgggaggaggggcctccgtgagcagcccctcctctgccgctgtcccagcccagtccctctcccggagccttggcagcctcccacaacccagacacttgcgttcacaagcaacctaaggggcaggtgaagaagcgcagccctgccagacgcgctagattcctctaaggtctctgagatgcaccgttttttaaaaaggcgtggggtgaactgattttgatcttcttgtctagatgcaataaataaatctgaagcatttaatgtagtcatcttgacattgggcctacactgtacgagttccttatgtttccttgagctaaaaatatgtaaataatttttgtcccagtgagaaccgagggttagaaaacctcgatgcctctgagcctcgggaccgctctagggaagtacctgctttcgccagcatgactcatgcttcgtgggtactgaacacgagggtggaaatgaaaactggaacttccttgtaaatttaaacttggcaataaaagagaaaaaaagttaccaagaatgtagcgtgctgctcctgggggctgtggcaggaggccgtggcctggcacaggggaaggttcccagccaatgacccctcatcccggcgcagctgcttggcaggggtgtggtggctggagcccctccctctccctcctccccgcaccaggttccctcccatccccaggttcctaagaggttgtcggggctcatacaacccgggaataactgctaaggggcagttggcaccatcaggaaatgtccccgccctacccctgccgggtacagggagcgtggtccacattctgcatcttttccctgttgggcaggtggctgcccatccaagcctcaggctctgcatctgtggatttggacagccaagccctacctcgcaggacaagcgtagcgagcagcgtcattgttgccaggctgggccgagggaagcaggaaggctccccaccgaggacagaggtgaagtgcgggggtggacatgactcggaaacaccaacgtccaccagcgtgaaaccctgaaatccctggaaacaggatcacaggttctcaaaatctcaccatccagcttaaaccctacccagaaatggcagggaacttctgggtcttgagaggataaccaagttgagtcgagaaagaatgaacaagggacccccttcccccaccgcatgccaagggttggggttatgccaacagaaggaggaagccactgcccagggcagagctgccctcccatgcccccgcctcacccgggtctcaggcctcgtgggcatttacatgtctgagacccgctgggtgacagctcctccctccttgcattcccagcccaggttcaaacccaggggtcgcctggggctggttgagaggctggggccacttctctggtgcccccagagcatgtctgtatatcccctgctctgcggttggaagtggcctgcgtataccggctgctgtcagtgttttccccagggcctcgggagggttcccctcggtagccatgaagcgaagcctcgcagggtccagtgattatgcccaacaggcccagagcgtcctgactctagccggagggcggggccagcaagggcaggtggtagtgacctgcctgcgggtgacctctaggggaagaccgattgccggccagccagctgctggaaacccccttcccccacgtcctactgctctgtggcacttcatggcgttgggaaaaaacccttaacgtctaaagagcttttctccaaaggaaagttggttctgaatcacccatggggtgaaggggcttcctggggattcacttaaggctgcccgatgggcagtgtgaagcttcccttccctccacaggccccggggctgctggccctgctccagccctgggtctacctgccccacttagagaccagccacctgggctcccaggccgtgcgcctgccttggggcccagcctgctctgcaggtccctgcagtcctgacactgcctggctcagtctgacttcctcccagagggcagcacgtgccccctgaacacatgcctgccgcctgcctgtcacctccactgacgcttccttgcccttttttttttttttttttttttgagacggggtcttgctatgttgctcaggccggagtgcactggtgtggtcccagctcgctgcagcctacatctcccagactcaagcaaacctcccaactcagtctcctgagtagctgggcctacaggcaagtgccaccacacctggctttgcttccttgactcttggtttgccctttaaattcaatttttttaagaggaagacttttcgctggaaacagaaaaccagcaccactgcagcattcatttcctagggccgccatgacaaatgatcacaaacagggcagcttaaaacagtagatatttactctcccacagttctgcaggccagtctaaaatcaagttgccagcagggctgctcctcctggaggcttagagggagaagctgcctcctgcctctctcccagctccggtggctccggcacttggcgttcctcgccccatgagtgaatcactccagtccctgcctctccccacagcaccttcttccccgtgtctgtgtcaaatccccctctcctttctcttgaaaggacagcagtcattggatttagggcccgccctgatcgacggtggtcttaactcaagatccttcatttcctctgcaaaaaccctatttccaaataacgtcacattcacagggaccagattcaggacatggacacctttttagaagggctcaccattcaacccattacccttgccagaaattaaagatataaaaacaaatgcagcacaagcaaatccatatcattaaatttttagccaggtcctagcacctgccacaggctctgggcccagccttgcctgtgccattaataggggaggcctattggcgcctaaccaagattttctcagtgataggatcagaagagctaaaacgccgggcatggtggctcatgcctataaccccagcactttgggaggctaaggtgggcagatcacttgaagtcaggagttcgacaccagcctggccaacacggtgaaaccccgtctctactaaaaatacaaaaattaaccaggcctgtggtcccagctactcaggaggctgaaacaggaaaatcgcttgaacccaggaggtggaggttgcagtgagctgagattgcaccattgcacaccagcttgggcaacagagtgagaccctgtctcaaaaaaaaaaaaaaaaaaatgctgacagaagaaaagaaccagctcactctgggactagggtatttaagtctgagtccttgtacccctaaatgtcatcccagatcagagatgccactatgacacacacatatcacagtgtgttgcgaactgtggaattcttttttttttttttttggagacagggtcaagctctgtcaccaaggctggagagcagtggggcggtcatagtttactgcagcttcaacctcctggactcagacgatcctccttcctcagcctcccagagagctgggaccacaggcacatgctgccgctcctggttaatttattaattttttcattgcgagaaggtctcacttgtgcaggctgatctcaaacttctaggctcaaacagtcctcctgcctcagcctcccaaagcactaagacaagaggcgtgagtcacagcgcccagccttgcaattcttatttcagttctccctctccaatagactcacccacaggcaacgactgtgttttattttcacctgttctgtgggagctgggtgcaggctctggcccatgagctctctgtgcatgtatgttggatggatggatggactgatggatggagtcattcttggatacagttccagattcttaaagcctgaattccattcagttctccatgcccatggccctaactttcagcctctccctatgtgtgctcactctggtgtcttccaggccttaccagggccagccaaagatcttcaggagaatttgcccgggccaggttgccaagggtaggagtgtttgagggctttcctctgccaccatcagaaattctgtgtcccccaaccctccacaggtatctgagctgagaccgagctgctgctggtatctcagtgatgagcgagacctcaagcagggtggagtaggtggcagtgcaggctttggagttgctgacgaggttcaagtccctgcaccaatgctccccatccctgtggccttgagtacatggtgaaaccgcatgaggctcaatttcctcatctgtaaaatgggaacctttctggcagtgtccttgcttgtgtagatgaagtgggggcaggtaaatcaagcacctgtacccagcctggcacatgcaatttcagccagggggtctcaccaacggcccagccagaaaaacaggcttcagcccaggcccaggccccctcagttacatgtaccccctcaggtacaaagccagcacctgtggggtacagctgagccctggaattttttaaggtccccagctgatcctcagaggcagctgtgatgattcagtttatgtgtcagcctgactgggctaaggggtgcccagatagcggcatgacatgatttccaagtgtgactgggagggtgtttctgcaagaaagtagaatttgcagtagggtgaggtggctcatgcctgtaatcccagcactttgggaggctgtggtgggtggatcacttgaggtcgggagttcgagaccaacctgaccaacacggtgaaatcctgtctctaccgaaaatacaaaaattagctgggcgtggtggtgggcacctgtagtcccagctactcaggaggctgagacatgagaatcgcttgaacccaggaggcagaggtctgcagtgagccgagattggccactgcagtgagccgagattggccactgcactccagcctgggtgacagagtgagaccctatctcaaaaaaaaaagtgggggctgggggagagagtagcatttgaaagagtagactgagtgaagaagatcaccctcaccactgtgggcggccaccattcaatccattgagggcccaaataaaacaaggaggaaaaaggtaaaatttgctttctgcttgatcccgtatgtccatcttcgcctgcccttggacatcagaggccctggctctcgggccttccagcttggactggaacgacactggctttcctgggcctcccagcttgcagacggcagattctaggaccccttggcctccagaattgcatgagccaattcccataatacagacggcccccaacttataagggttcaactgacaatttttcaaccttatgacaggtttatcgaggtactaaagttgttttcaacttaggatgtgtttattgggatgtagcctcattgtaaattgaggggcatctgtaaatctcatttttaatttaattttattttagaaacagggtctcactctgtcaccgaggctggagtgcagtgttgccatcaaagctcactgcagcctcgaactcccaggctcaagcgatcctgccgcctcagcctccggagcatctgggactacgggcgtgcgccagcacacttggtaatttagttttttttgtctcactatgttgcccaggctgatcttgaactcctggcctaaagtgatcatcctgcctcaggctcccaaagtgctgggattacaggcatgaaccgcagtgcccagcctataaatctatatatctatacctgcctacctatctacctacctatctgtatctcctgttggttctgtttctctgaagaatcctgactgatacagcacccaaaataagaagccagcctggcccacctctgcagcccaccctggctacaccccaccacttggagcacacaagccctctgccctgtcctggaagacccctcaactgattcccctcccaggaccttggcacctgcctttcctccctccagccccctccccaacctctgcacctgcacccatcctctgtcgttatcctccgtccacagaatcagtgttacttccagggactattctgacgtcagacccctgctttcctccatcagcagctgccacccatttctttcctggcgtttgtcacacctcaaaggatttttgtttctttgccatgagcaaaatctcatggctttcgtttggggaacccctgacatcagaggcctgaaaggaggacacagtgcagctggtttatttgggtagtggccccaggaagctggagtgggagctgggagagaagggcaggaggccagtagacagggcacagctggcctggtcaccgccagacactgctgggggcacttgatactcagcctctctggagcccctctgcagagctgcatagatgagccttgggactggtcctgggaggggcaggaggtcaggcatttatcccccaactctcatgccctgttggctgaggactgtcccatgccatgaaggtcctgcttcctcccagctgcctcgcctggagccgagatggctcctgagtgagctcctcatttggacagaaaattggagactcaacaggcacatgggctggaagactggtgggggcctggggacctggagtggatgcagggaggcgctaccagaccccaaacacagtagccacaccccccaaaccagaggttacaaatgggcagcccctgggtccagtgcagcccctctgtgtgttccgtttggccatcaaaggcttttaaaagaaccattgagccaagattttaaacgtcggggatctggtacaaatacctggattcctggcttctctttaaaaatcacatgtgaggatcttgggcccttgtccacctggatagaagtacggaccagtctttggcaggtgtgggctccccaccctgtcagctcccccaacacctgggcctaggggcagactggtgatcggtggctggtacagtattttctccttaccctgaccccttcacctccagtagcccttccgaacccctgggtcaggtgcagggagctcaatatttgattagcccagcccctgtgggtaaactgaggccaccctcctgagcactctccgctgctacccgcatgtcccctccccaagaaggcagctaaaaatattcaagttgctgccctatgggccgagacccagggcctcctcactctctcattccacctccgcctgtgtgcctgcttgggctgcatcctggggacacagaggtgacctgaacacagccattgccctcacaaaggacaggatctaacaacagacaggcagaccatgacttcccagctgtggcatctgcacacagggcacagaaactaacttcttaggcctccatttcctcatctggaaaatgggtcgctccctgggttccctctccccatttgcatgccccagcggatggtaggaaccactccgcttgttcattcaatccccgtgtttgttctttggctccactctgcagcactagctcccgggccaggctgggcgtggcgtagatggaagatggtaaagaagccagctagaaaggcaggaacgcagcgtgacggtgccatacccagagggcctgcctgggcagcccccagaggccttcaaagctacactggagagcttggccgagggaccaatggcaatggcacacactgaagtgttttacacaaaaaaaaccgcctggctggatgtggctggcaagaagatggccggagctgcaggtgacgagtgatcaagaggagcccatggcagtggggacaggtcacagctgaagtgggtgacctgcaacatgttcagcaggtaaaattgacaggtttggtcggactggccacaagggagaggacgggtaaaggacagctcttggtctctggccaggccggcggctcaacaagtgtccaaacaaaccatccgtgtgcccggtgtctacctgagctgccgtcacctcttcctttgccgggtttcatttttctcttttgctgtgttgctgcaactggttgccaaaaggactgcacagctctcctggcaatttggcaaagtctagaacaacagtatttcccataatctcaccattaaaggacaacccttgtggacatcctggcagatttctttctggtcttttttctatgcattttagaattgaaataacacagtgggtgtcatttcatgtcatgcttttgacccagcgtgacatgatatggttcatcatttctccacgatcctggaaactccattttttttttttttttttttgagatggagtctcatgctgttgcctaggcaggagtgcagtggtgccatctcagctcaccgcaacctctgcctcccgggttcaggcaattctcctgcctcagtgtcctgagtagctgggattacaggcatgcaccaacatgcccggctaatttttgtatttttagtagagatgggttttccccatgttgccctgcctcatctcaaactcctgggctcaagcaatttgcccacctcagcctcccaaagtgctgggattacaggtgcgagccactgagtctggccatggaaactccatttctaaagtgtgtaacaagttctgctgcagggaatgtatccctgtggctagctgtgcaccctcgtggtctatccacattttatattacctccccagaagaggtcctgagcatgggaattactagatcatagaaaggtaaaccatcttaagactctggctacaaattgccagattgctttccaaaaatattggaccactgacactctcaccagcgatgtacacaagtgcccatctcaccacagcctccccaccgccaaatgttgtacattttaaatctttcccgatttacagcccagctcagagttcacctcctctgagaagcctcctcagatttcccctctccatcctcgacattcccacagccagcggcccccctccctccacttgtccctagtccatcccagctggaggtctgacgttccagggctggagtctcctctgatccaggtgaggcccccagcagcttcccagcctcaatcagcctgcatattttgagtctcttgtagatggtgggaagccttctagtagtatcatcttcttttacagaacagcaactgagacccagaccagggaggctgagtgactgatcctgagtcacacagctatgaggcagtgttgctgcagctaaaatagcagcaaaaactcccacttaatgggcacttcctccaggccaggcttagctaagcagtttctaagcctaatcggagttcatactcccaataaccttgctgcgctgggactattattatccccatgttacagatggcggacccttgaaccagggccacttggctgagaagcgaagtcccccctgggacttggacctaaaatctgaagtcggcagtgccttgagcaggagtccacgagcctggtccagtgccctgggcctggcatcctttgcctctcacagagcagatacaggcagccaaagacagaaggagcccccaccccacaccgtgaccagggccagagcaggccttgtgccagctccaggtgccacagcagggcacctgccccaccccgcccccaccttgggttgccctgcagattcacaggaacagcctggagcccacccaatctcagtggcttctctcgaacatgcttatctcccaccccttattgacttggggcttttcctgccaatctgcccaagcgggaacagcccttttcagagtaactgctgccaaaatccattggcgcagcgcaccgtctgcctgggccttgatggcatctgtcatgagaggtgggaactagaaagccccatcctcgggcccctccccaggaggcttcagcaggtggagagggaaggcttggcttctcccaggacttgaacattgatccagcaaaacttagctgggcacagtggctcacatctgtaatcccagcacttttgggagtctgaggtgggagaatcacttgagcccaggagtttgagaccagcctgaccaacatggcgaaaccccatctctactaaaaatacaaaaaatagctgggtgtggtggcatgcgcctgtagtcccaactactcaggtggctgaggcatgagaatcgcctgaacacaggagacggaggttgcagtgagctgagatcatgtcactgcactccagcttgggtgatagagtggcactttgtctaaaaaaacaaaaaacaaacaaacaaaaaacgttgactgagcacatactgtgtaccagacactgtacaggtcactagggaggcagcagtaaatgactcagacaagggagggaaggacctcccagcaggggacataggcaacaaagaaaattaaaaataggtaaattctataaaaatacagccaaggaagggggatcagcaggccagtaaggggaagaaaggagctaccgttttaaaccaggaggtcagggaaggttgttctgagaaaggactttgagcagagattgaaggaggtgagtgagagaacctcatggatgtctggggtgacagcaccccaggcagagggaacagccagtgcaaaggccctgg

SEQ ID NO: 267 - DNA, 6809 bp, Homo sapiens
agtgctgggctgtgggccggggaggaaggcggctcgcggttcctccaccgcctccgccgccgcatcctccgcttgtgctaccgccgcgggcgctgggccgctctgctggtccggcatgagaccgtgagacgagagacgggtcggggccgccgacatgtttggccgctcgcggagctgggtgggcgggggccatggcaagacttcccgcaacatccactccttggaccacctcaagtatctgtaccacgttttgaccaaaaacaccacagtcacagaacagaaccggaacctgctagtggagaccatccgttccatcactgagatcctgatctggggagatcaaaatgacagctctgtatttgacttcttcctggagaagaatatgtttgttttcttcttgaacatcttgcggcaaaagtcgggccgttacgtgtgcgttcagctgctgcagaccttgaacatcctctttgagaacatcagtcacgagacctcactttattatttgctctcaaataactacgtaaattctatcatcgttcataaatttgacttttctgatgaggagattatggcctattatatatcgttcctgaaaacactttcgttaaaactcaacaaccacactgtccatttcttttataatgagcacaccaatgactttgccctgtacacagaagccatcaagtttttcaaccaccctgaaagcatggttagaattgctgtaagaaccataactttgaatgtctataaagtggataaccaggccatgctgcactacatccgagataaaactgctgttccttacttctccaatttggtctggttcattgggagccatgtgatcgaactcgatgactgcgtgcagactgatgaggagcatcggaatcggggtaaactgagtgatctggtggcagagcacctagaccacctgcactatctcaatgacatcctgatcatcaactgtgagttcctcaacgatgtgctcactgaccacctgctcaacaggctcttcctgcccctctacgtgtactcactggagaaccaggacaagggaggagaacggccgaaaattagcctgccggtgtctctttatcttctgtcacaggtcttcttaattatacatcatgcaccgctggtgaactcgttagctgaagtcattctgaatggtgatctgtctgagatgtacgctaagactgaacaggatattcagagaagttctgccaagcccagcattcggtgcttcattaaacccaccgagacactcgagcggtcccttgagatgaacaagcacaagggcaagaggcgggtgcaaaagagacccaactacaaaaacgttggggaagaagaagatgaggagaaagggcccaccgaggatgcccaagaagacgccgagaaggctaaaggtacagagggtggttcaaaaggcatcaagacgagtggggagagtgaagagatcgagatggtgatcatggagcgtagcaagctctcagagctggccgccagcacctccgtgcaggagcagaacaccacggacgaggagaaaagcgccgccgccacctgctctgagagcacgcaatggagcagacccttcctggatatggtgtaccacgcgctggacagcccggatgatgattaccatgccctgttcgtgctctgcctcctctatgccatgtctcataataaaggcatggatcctgaaaaattagagcgaatccagctccccgtgccaaatgcggccgagaagaccacctacaaccacccgctagctgaaagactcatcaggatcatgaacaacgctgcccagccagatgggaagatccggctggcgacgctggagctgagctgcctgcttctgaagcagcaagtcctgatgagtgctggctgcatcatgaaggacgtgcacctggcctgcctggagggtgcgagagaagaaagtgttcaccttgtacgacatttttataagggagaagacatttttttggacatgtttgaagatgagtataggagcatgacaatgaagcccatgaacgtggaatatctcatgatggacgcctccatcctgctgcccccaacaggcacgccactgacgggcattgacttcgtgaagcggctgccgtgtggcgatgtggagaagacccggcgggccatccgggtgttcttcatgctgcgttccctgtcactgcaattgcgaggggagcctgagacacagttgccgctgactcgggaggaggacctgatcaagactgatgatgtcctggatctgaataacagcgacttgattgcatgtacagtgatcaccaaggatggcggcatggtccagcgattcctggctgtggatatttaccagatgagtttggtggagcctgatgtgtccaggcttggctggggagtggtcaagtttgcaggcctattgcaggacatgcaggtgactggcgtggaggacgacagccgtgccctgaacatcaccatccacaagcctgcgtccagcccccattccaagcccttccccatcctccaggccaccttcatcttctcagaccacatccgctgcatcatcgccaagcagcgcctggccaaaggccgcatccaggcaaggcgcatgaagatgcagagaatagctgccctcctggacctcccaatccagcccaccactgaagtcctggggtttggactcggctcctccacctccactcagcacctgcctttccgcttctacgaccaggggcgccggggcagcagcgaccccacagtgcagcgctccgtgtttgcatcggtggacaaggtgccaggcttcgccgtggcccagtgcataaaccagcacagctccccgtccctgtcctcacagtcgccaccctccgccagcgggagccccagcggcagcgggagcaccagccactgcgactctggaggcaccagctcgtcctccaccccctccacagcccagagtccagcagatgcccccatgagtccagaactgcctaagcctcaccttcctgaccagttggtaatcgtcaacgaaacggaagcagactctaagcccagcaagaacgtggccaggagcgcagccgtggagacagccagcctgtcccccagcctcgtccctgcccggcagcccaccatttccctgctctgcgaggacacggctgacacgctgagcgtcgaatcgctgacccttgtccccccagttgacccccacagcctccgcagcctcaccggcatgcccccgctgtccacgccggctgccgcctgcacagagcccgtgggcgaagaggctgcatgtgctgagcctgtgggcaccgctgaggactgagtcagtgccggggcctccctttgtgtgtgtggccccgctggtagggaccccagtgccgctgactggcaagacacactgggagcacccaccattctgtgcggcccccagcagccatctcaaccacctatccctgcgctcccttgaatgggaagaagccccacgttgtccttgaattcctttttcactttgcatctcttcacgtgcaggctgggaccagcggagacaccgcggcgaatgcagatgactgcaccggccactcagggagctgcctgggctccgtgtctctgagccccgggtggcaggacccaccggcacctctttcttcctctgtcatatggctcctctgtcaccagccccagtgtgcacagaagaattggaccaggtcactgtacgtagaaatttgtagaaaagcagacttagataaacatctcctttggatatttatttccgcttttggcagcaggtgaacatttatttttaaaacttctatttaaaagaagtccaaaaacatcaacactaaggtttgatgtcatgtgaaaagtgtaataataacagttaagatttcatgatcattttcactggacctttcctgatattttgtttcagagttcttagtgtggctttttccatttatttaagtgattctttgttactcactaactctgcaagcctgtggaataatgaagtaccttcctggaaagtttggattattttttaaacaaaaacaagggagatacatgtattctcaggtacacacagagctgagagggctgaatggttttctgctatagcagccgagaggcctcccatcatggaaagatttctccaggaaaaggaggaatgtagccagctccccactcaggacgcttcctcatttctcttcaccaaaaccaaacagagacagcttccagcaccttcttcagtgttaccatctctaagaaggaaccagttgggaccgtgaagactcccgaccctgtggccatgatggaaatcaaaggaagacaccctctacgtcacctgccctcgactgtgtgtgcccacatgtgccgagagatggcccagagccagttcccctccagctgcaagggcatggtgtccccagagctctgagtctgtcactctccctctgctactgctgctgatctgaatatggaaaccccatggttcccttccccattcggactgggtgtgtacaagcaaggacccagatgcatcagacacagcccccaagatgttcctttctactcggccagctcgggagccagacacagcactcacagcccaggccgtgatccaccctccccaagtccaccagggccagcggcccctcacctctctggtcactggtgagaccttccacaactttcctccagacctgccagcagatgtgcccaccaggggcattaggtatccgccggagcctggccatagggtagtctcgggagccgcgctgagatcttttgccacctgcattttagaagaacatggtctctgtctcctcggcccagccagctgtcccggcaaggcctgccgagggcagttttcaacctcatgaaggaaacacagtcctgccaaggagggggagtggcgcccatggggacaggcctcagtccttagaagccctctgggtagctgtgcccacccagccttcatggctgcaggtacaaggacctttgcttccatagagaaaacgcacagctcagaaagggggccacatgggcagaaacccaaaggaaggacaaaccacgaccaccgtggccatctgcagaatccctggaagagaaggaaggcagggtggagcggggggaagaccatcatggagagaaggaccacagcatcaggagacgggacacgccacacccagcaggcagcctgtgtgttgcttaattttttaagagcaagaggggtagagaggatcaagctggccctggctggagatggctagcccctgagacatgcacttctggttttgaaatgactctgtctgtggggcagcagaaactagagaaggcaagtggctgccccaccccaaggcgtgaccaggaggaacagcctgcagctcactccatgccacacgggtgggccaccagcctgctgtcagaagtctctgggctccaactggtcttgtaaccactgagcactgaaggagagaggtcttggtcagggctggacagcatgcccgggaggaccagcagaggattaaaggtgactgggaggaccagcggaggataaaagacactgctcagggcagggcttctaccctgcatccctggccaagaaaagggcagtccccatgtgggcttgcagggtcactctcaggggcctctttcagctggggctggcaacttgcgtctgggggacacctccaggtgtgtggggtgaggatttcctataaccagggctcccagaagctttgcttatgtaaggaggtctgggagccagcccattggaggccaccagccattttggcttcaaaggaccccacctcacccaggtctcagcggcagtgggcacagctatgtcttcaggagctcccgtcaaacctcatagctggggcgctcccagacaggccagtccagacaggacacgctgggcccctggcatccagaggaagagccaggagtgtgggaaggcccacagtgggggctgtggcttctgacactcaggtcatagcctcagaggtctgaggtcagcccccacagacccatccggcccgccccccaagtccctgcagagagcacttagagttatggcccaggccctggtccacccttcccctgtgcacctccggctgggtttgccaagtcagggagcagggctggccgcaggaactcccaaaccttggctttgaatattgttgtggaggtgtgctcgtccctttctggacgtgcaaggtacctgtcccagcaggtcagatggggccagctgaggcgctcccccaggcaggaagggccagccttcaccatcgcgtgggattgggaggaggggcctccgtgagcagcccctcctctgccgctgtcccagcccagtccctctcccggagccttggcagcctcccacaacccagacacttgcgttcacaagcaacctaaggggcaggtgaagaagcgcagccctgccagacgcgctagattcctctaaggtctctgagatgcaccgttttttaaaaaggcgtggggtgaactgattttgatcttcttgtctagatgcaataaataaatctgaagcatttaatgtagtcatcttgacattgggcctacactgtacgagttccttatgtttccttgagctaaaaatatgtaaataatttttgtcccagtgagaaccgagggttagaaaacctcgatgcctctgagcctcgggaccgctctagggaagtacctgctttcgccagcatgactcatgcttcgtgggtactgaacacgagggtggaaatgaaaactggaacttccttgtaaatttaaacttggcaataaaagagaaaaaaagttaccaagaa

SEQ ID NO: 268 - protein, 1051 aa, Homo sapiens
MFGRSRSWVGGGHGKTSRNIHSLDHLKYLYHVLTKNTTVTEQNRNLLVETIRSITEILIWGDQNDSSVFDFFLEKNMFVFFLNILRQKSGRYVCVQLLQTLNILFENISHETSLYYLLSNNYVNSIIVHKFDFSDEEIMAYYISFLKTLSLKLNNHTVHFFYNEHTNDFALYTEAIKFFNHPESMVRIAVRTITLNVYKVDNQAMLHYIRDKTAVPYFSNLVWFIGSHVIELDDCVQTDEEHRNRGKLSDLVAEHLDHLHYLNDILIINCEFLNDVLTDHLLNRLFLPLYVYSLENQDKGGERPKISLPVSLYLLSQVFLIIHHAPLVNSLAEVILNGDLSEMYAKTEQDIQRSSAKPSIRCFIKPTETLERSLEMNKHKGKRRVQKRPNYKNVGEEEDEEKGPTEDAQEDAEKAKGTEGGSKGIKTSGESEEIEMVIMERSKLSELAASTSVQEQNTTDEEKSAAATCSESTQWSRPFLDMVYHALDSPDDDYHALFVLCLLYAMSHNKGMDPEKLERIQLPVPNAAEKTTYNHPLAERLIRIMNNAAQPDGKIRLATLELSCLLLKQQVLMSAGCIMKDVHLACLEGAREESVHLVRHFYKGEDIFLDMFEDEYRSMTMKPMNVEYLMMDASILLPPTGTPLTGIDFVKRLPCGDVEKTRRAIRVFFMLRSLSLQLRGEPETQLPLTREEDLIKTDDVLDLNNSDLIACTVITKDGGMVQRFLAVDIYQMSLVEPDVSRLGWGVVKFAGLLQDMQVTGVEDDSRALNITIHKPASSPHSKPFPILQATFIFSDHIRCIIAKQRLAKGRIQARRMKMQRIAALLDLPIQPTTEVLGFGLGSSTSTQHLPFRFYDQGRRGSSDPTVQRSVFASVDKVPGFAVAQCINQHSSPSLSSQSPPSASGSPSGSGSTSHCDSGGTSSSSTPSTAQSPADAPMSPELPKPHLPDQLVIVNETEADSKPSKNVARSAAVETASLSPSLVPARQPTISLLCEDTADTLSVESLTLVPPVDPHSLRSLTGMPPLSTPAAACTEPVGEEAACAEPVGTAED

SEQ ID NO: 269 - DNA, 21930 bp, Mus musculus
ccttacagggcaattggggtcctgccttcagctgaagggctttgtccacaaggcctcagtggactggcaggacagagggctggaactgaataatgttcccagggtgcctctgcccctccctgagaaggcccgtctgcctgtgacacagccagcccaccctcaatctgaagtgcagaagaggacagtagtgagtgctcaggccgaggcatggagacaccaacccagtgctccctaaggttataagcagcaggggtgatagggctcctcccagggtaggacacagctgttaaacaggaatgggtcccaaaagaccagggaacatcttggtccctcagtccccgcccttgaacgttggcaggtattcccaaggtggaagttccctgccatacagtccgggcactgatgaaaggcagttcaaggctgaaagctatatagctgagttagggtcactgtggccctgactcctgccataaccatgggtaaagagtaggaacccagtggacagggctaacaggtacacacagctatgctgggaaaggctgcttcatgcttggaagctagggaaaggagttgagagttgcaagccttttgcccagcccaggggtggggagtggaggacttgatagaatgagcatcccagtaggcctgggcctttggggaagcctggcagtttttgtggagacagtcatgagtcctaggtggaacacatggcagtgagaagtcagtgcaaagtagatgaggccacgtatagatagatgaggtgtagaagcctctagctgtacttgagcagactgatctcggtgggcacaaatatcccagtcctcaacagagaaaggtgcccccccccccacacacacacaccttgcccccaagcaacaaagcctacttctctctccaccaggaggctgcccctgctaccaggccccgacactctcaaactccaccttggccgaggtggtaaagtggcactagctttcctgaggtctgctcccaagaagcatctgagaagatggatgagagtcatgctcttcccctccctcccacattttctgtataaccttgggcaagttacctaacctcaactccctaatctgagaaatagggttaaaagaatacacaccactaggctgcatagctgaaatgacctgactcctgtagggaggaacatagcatctggcaacctcactgagggttgcttttcttgagttgcaggaagtgccttgcagtttccccaggtgcttgatgctactgagacatgaaaagcccagcaactgcccaagaggagttccatctatggtcacagtgataccatcagtcactgtacttacaaagaggcccatgattcataggaagagccatagctatgtatgattgcccttgactgtccccagatcctcttggtctggggatctgatcaggcctctaggctggtgaccactgcctctctggatagcagtgaaggcagagatatgtgatgtgggtctttgatcaagatgctatgcagaacaaacccaacttacagaatgggactttacctcttcttaaaaccctggagacagacagagcttatacagggaagaattccaggaggtgacttaagtttgcagatctgcggcacacactcctcatagaactgtgccaggaggaacaatagcctcagagtgaggacagggcttagacaagcccacagagggacagagcaggaccgcaagctgatattttgtgacccattctaaattctgtggagctcctcttacagctgtataggtacaccctgagattttctatgtatgcccctgtgcaggtgataaaatggcaaatcatagtttaatatccaaagaaatcacactttaatagttgaaaaatgcttgtttcctgcattctaaaaaaaaccccaaactttaagtagagaatcaagaaattcagagtccaagcttgcatatctgagccgtgccccagcccagtgactgtctcattttaggcaaataaaagaattcttgctttcctttgtatccctcccagcactcagaaaacagtctcagtttaagatttcaatttttttttttgatgctggcttttaatttcctgtttcacagattcttggacttataaattcgtaggtctaaagcatagaattagagtctgaggaacacctagtagcctcttcaagatctgggaccacctagacacaggacaaagaatggagatactggcactgcacctcctaaaaggacagtgggaaaagcactggggcgtggtcctgtaacgtacaacgtcctactctgtcctggcaatacccaagaagagcattctcccttctgatctggttgtggcaagccctgagcccccagagtggcctttaacaccgatgtcacatttgtcttctcagtggaatgtcagtcacctatcctccatgtcaccggcctaagtaaactatgctccaaaggcattatcttaagtgaccccaggagacaagccaccctttggtcctcagcctaactgaaatacctacctcactagcctgactaccagagcagcgcagcctcctaacgctcccaggcgttgggaaggttttcaagcactggatcgtaagaggacagctcagactgtctggccagcctgcacaaaggccctcacagacctacggaggctggccacgtgccaggtcctctccatcaagtcaccagctcctcaggtgtctgggagattctcccggtgttccaaaaggaaaaacaatacgcctgcctccatgatccaaaagctgatccggacagagatgaacacatgagagaggctgtgcccgcctcgacatgcagcatggagagcacagaccgtttggtgtgcgagcgagggctcttggaattcacttctggaagaagtgctacctagcgctctccacggtttcggaaacacgggaggatgggaagcacggcctccgacacagagacaccaccgtaagccggagcaaggcagctcttacgccaggcggcgcttgttgatgacatcacaaggacgcaccttatagtcaggggccgcgcaggcgttctgccggctgccgcgggcgcagggattgcgctgatataaccacctgactaccggagcttgcagtttcgctctcggccgccagtctaatctggaagcgcctcgtagacactccccgtcctatggtttttcccgagctcgcttgcaagccccaccacactggccagctcaaccgccacagtccaccctccggagtgcgaggacgcacgcccctggcaactcctaacccctcagtttgaggggacactccccactaagtcccagaattccgcccccccccccgtggttccttctggccatgctttctggctttctctctatgctgtgtgattctaactgcccctaaggtcgtgtgtaacccacgtgcagatcaggaacctaatcctttttcctgaaatacctctcaccctgttcgtcttcctgtgcgctcatatccaaactcactgatgaccacgcggctcttccccagtgtcccccctctacggagactagcttggaaactcattgctcactattaaacgaaggaaggaaaaacagcttatcgttgcggtcctctggatcttatggtctagtgccgattggggtacagggtatctctgaataccttgctctgggtaatgtggtagctacaggaggaagttaagttgctatggaaggcagtagtgtgcacaggctgcactgctggacctgctgcatgtttattttgacctggccctgtctcctatgggccagcgtcattgatcagatgaaaagagctgcacaatgggaggtatgtgcaccttcctgggaaacccaaactaggaaaactggagccttgctgcagcttgggtctataaaggggcaaggaaagttcttccttttgtcaggaacagaaagggcaagaggcagtatgctgtataacctgctggtccccagaaagggatagcaatgaacaaaagaccagtcaggtttcacactcagcagctgcccagatccaccccaagtggcactttgggatctgcctctgaacatgcgactgctggggaaactgagacccgctagctggccctaggtctgtccagctcaggaatgttccctgcttgtgacaattgagcgaccaaagcagattaacctgggtgttaatcccctctaatggtttcagaatcctcgatgcgaggcgctaagccggcctttctccaaggcctgcagaagcccttcccaaagccttcgcctgcagccgcgccgatgctatctcagccccgcctggcagcgaacccgctctaatcccctgtgctctctttcttcccctgcctgcctgagatgaggccgattggcgtttgattaccgcgctatcgaggaccctttgtgcaatcggccccaaatcccctaattctgtgataaaggctgcattagcagacgtttgctgtagaaaaggcactggcatgaaagaatgcaatcaggggaatcctgatggcctggcgcaagcctgttagtgagtgaggacaacaaggagagggggatgcctccattctacaggacaggggaggggtggcgaggcccaggagagggagggcatcgtgtcctgggtatctccaatccatcttcctcagctctgaatgtttgggctgcaagaggagggtccaccccacctccagcctcaccatcgcactttcaagaccttggctttggatatatagaatggtggtgcctaccttgaaacgcagggttaggagagaaaagtggctggaaatgagttaggaggctattcctgggctggcgtattggctcctgcctctatcccaatgcctgagaggtagaggcaggagaatctaggttagtaagctacatagtgaattcaagaccaacttgggttatataagacctcatctcaaaaaaaaacaaaataaagctaaacaagcagaacaaaataaaacattcatcaaagaaaatggcagatggcagagactcctaaaatggcaccgctaaggtcagcagcaggtaggactggaaaaggccagaggtggggagggaagagtggtgagtgtggtcctagggttgaggggtcggcagctccagggataggtaagagtttcccaagggatgcaggtgggctggagggctcttcacctgggtgggcaagtgtgcacttaataacataaagacagctgacatgttaatttactgaagtgtgggaaaaaaaaaaaagtcaggccatatcaaggaggacacgtggctctgtccagagctgactcatcagccctctagctggtgaccttgggtcattacctgaatgacagagccacccaaaccctgaacagaacttgctatggctctagagatcccaaaaggctggctctgatttcaaggtgggtcacagatgaagtccacggacttctgtctggagactggtcctgcagatgccttctgcttagttgtctccctcccctgtcttatcaggtagccctgttcttcccagggtgaccaatcaactcagtcagtgttctttgatcaaatgaacttcccaaaagaacaggacattggacactaaaagtgcagaatccctggggaagctgggattcctagttcacctgtgtttgtgcatccctcaaagaggtatattaaaagtgtaaccccagggctggtgagatggctcagtgggtaagagcacccgactgctcttccgaaggtccagagttcaaatcccagcaaccacatggtggctcacaaccatccgtaatgagatctgactccctcttctggagtgtctgaagacagctacagtgtacttacatataataaataaatcttttttaaaaaaagtgtaaccccagggacctgtgaaattgcaaatatgacctttctagctgcagtaacagtaagattaattaggatgaggtcttactggacatgctaagtgctctaccaccaagctggatctcattgccagtccttccccctcccaccccaccccccacttagactcctgagtgctgggataaaaggcatctagctttctcaggcatgctatgtgtttatttattattctcctttttagctcattggtgtctctctggtaaaaataaatccctcatagttaagtattatattttaaaaacttcaacttgagccaatgttagtggcacatgaccgtaatcttagcatttgggaactggaggtaggggatcaaattcaaggccagtcttggtcgtgtggtaagtgtgagaccagtttaggttacaatcgtaggaccttgtctcaaaccaaagaagtggccaagcttgtgcttgtgaccttgggttcaatcaccaaagcacactaaaaagggctgaaccccggggtggggagggggtaggcatatggcttagtggtagagcattcacctagcatggtcaaggccatgggttctattcctagcacccacacacagagatggaggtggtattaaaccatatcttacttatatacaaaaattagcttaaatggatcaatgtaagagttataaaacatagagtttataaaattataggctgcaatacccctgccccaatttccactgcaggagatagaacctaggactttgtgactgctaaacaagtattctcccatctgaagtagatccccagcccctaccagtaaatcttggttataacagtggcttcttagatatggcaccaacaacatacacaaccaaagacaaaataaatttggtttattccattttaaaaatatttttgttcttttcttgttgttcagtaatttcctccaaagtctttttgggacctaggaagttctaaatgaggaaacttcaaagggaaccttgttaagacaaagggaggaaacaattcaaaagtctcaggaagttgctgaaactaacaagattcacaaggcctctccctacccatgatgctagaagcaataagagctactgagaaaacagcagatgactggttatttctccactgctgaaatgaactaattcaagccagattagattatattaaaggcaggttcattgggccctggtttctggcgggagagttcgctggccccaaggaccaaggccagggacatcaccatagggaaaggagaataggggagggagagaaaggagcagagagggaagagaagagagggagagagcatgcaagtgagtgcaaaatgtctggactatatagggaggaacctatgggagaagggcagcccattcccctggctggaaagtttagggttggggggggggcagagtatgccaggtagggactgagggatgctgggagaacctggaggccaggtctggtttggtatcccttgctccccatctgaaaccaaacaaagacctgcaacttttaagagctgtcacccaccaggcagtggtggcgcacgcctttaatatcaccacttgggaggcagaggcaggtggatttctgagctcaaggccagcctggtctatagagtgagttctgggacagccaggactgcaaagagaaacccttactcaaaaaaaaaaaaaaagaaaaaaagagctgtcactcatgcaggacaggacatttggtcactgcattagttacgtgtctattactgtgataaaacatgatggggcaaagtgcaaaaggagggtttctgggcttacagttttagaggaataagagttcattcctatcatggcttttaaacctcaaaacccacgctcagtgatgtaaatccttcagcaagaccacacctcctaaacctatgcaaacagcaccacctctgttatcaaatattattgaacatctgagcctatgggggccggtgtcgttcaatccaccacagtggtacagctttgagtcatttctgttgctgtaacctcagccatattcctagtaaccctaccaagttagacctcagtagtgctcttactttggctatcactgcttccctacttggggtgagtagatgtttgtttacttgatactttcagaaatagtgtcacaagacactattacacacacacacacacacacacacacacacacacacacacacacacagtggtattgccccagtcgtctctaagcaagttcagaagacacaaatgagccacatgcacaaatgactgccaccaagtgcacagagcctggctcactgacacctcaatatggtcctgacaatatggtcaatatggtccattgagggagaactccccaagggcacagctttggcagagcaccatgtcatcttcctacagggagagaaatacaagagaaaggaagcaaggctatgggcatggaaagaggaagaaatcccagaggccttcctgtccctggccttgctgccccattctgagcagacaagagtaacgggccacttcacacccctgagcattgaggtgggtttaggcacagatgttctacacgaatgtctgctagacaagtcttctgcatccaaaggaatccataggaggtctggggctgtggcagccattctgtaaccatgaggcaggctgaaaggtcacacagttaatagtgctactcataagcctttcagatgaacacactctgggacttttatgatggatgagacagtaatgtccatcacttgaagcccatagagtcctcactggtactagagtgtagtcagcagaagaacttataagaggacttggtaaagtgggagatgggtgactgggtatgctgcctactctggctgctaatattcctgggacatcaaccccatgtccagttgtgctctggatatctcacacccagtaactgcttaaaccctaagaacaaatcattttttcctttgagacagggtcttgccctgtagctctgactagccaggaactcacaaagatctgtctgcttctgcctctcaaatgctaggattaaaggtatcatcatgccttaaaaaaaaaaaaaaaaaatacagatctcaccagactggcctttccctcacagtaatcctcctgtctcggcctctggagcccctggaatcctgcgactatagatttggctcaccattctcaacgcttgtccccttaggaagaacccttgatagttgatcagtattatgacattaaacaagccacaatgcttagtaacagtgaggcagtccgctgctctgtcctgaaagacacacgccatattttcagagatcacaaaacaaagtgtcttaagcaaaggcctagaggttcaaagcttcataattgagaatgacgaaaatcgggccaagtatttgttctcagttggaaagaacagtgggcagaagttatattgtagacaaagcggaactggcctgggcaaagggtagggcaggggcacatgaaacagctcttagaaaatgtggtgtgagggagatgttgatgtacacaggagccgggcaagggcgtcagggaccttctaagacaggagataacaagaaaaatatcttctagtctctagaaagaaggcacagaattggcagctcgcgcctttgctcccagcactcaggagacaagaagcaggcgaatctttatgagttggatgtcagtctcagcttcccatcctgtaggtattcttctataggagattcagaccagggcttcaaagtgagcaagagctgtcaagtagggtcatcctgctgacagggtgctgagctcactggaaatcttcattccaggaatctccagtttcatggagggaatgagggaagccaggggcagagaggtggcggggaccctgtgagttagaggcttccaaggtcctggcattcctcctggcaggcgaccttaagcctgccttaaaagatataaaggatgggctcctgatcccttcctttccctccagctctagacgtggcagagtgcaggactccctgctcccagcgcagtccccggtacccagacgaaggggcttgccctcctccatggccggggattagctctctgaggactggcgacgggattagcacgcgcgaacgcggcgcccggtctggggattaccgcacctcccacctccctatgtatatattccgcctcttgcgccgcccgcccgcgggcatggcgactgcaggcagcgcggccagccgcagggaccccgggcgaccctgccctttctccatcgagcacatcctctccagcctgccggagcgcaggcccgcgacgcggccaccgcagcccgtcggtggtcggaaccccgccgagctagacgaacccgaggcgcccgtccccgctgctccttgcgcctgctgctgctgctgcaacccgcgcgctgcgacccgcggaaccccggagacatcgtccgggccgggtgagtgcgcgcggaggggcaagactaggcggggatctcgcggggcggcctgcggggcgagcctggctccccctaaccctaattggaaccgtaaccctacacctgaccccaccccgccccttaccgccccgcaggcttgcggctggcgtggccgctgaggttggcgcccgccacgccctctcccttgacggcgcctagagcaggctccccggcgctgactggcacgagcggccccggcccgcagaggcgcacgcggcgccaccgtaccatcttcagcgaggagcagctgcaggcgctcgaggcactcttcgtacagaaccagtatcccgacgtaggcacacgcgaacgcttggcggtccgcatccgcctgcgagaggagcgcgtggaggtgggtgttcagcccgcagcctggaggccaactccggcgccactcttatttttcaaagaccgaccttccagaaggggcttcaactcgtagccggctacactgaagggagaccccctatgatcactcgatgagggcgcggggccggttcttccagcacgttatttgggtgtccctggaactggaagaggtcaagagtcgttttctttgactttgtccggctccccagtttcccctgatgatgaaatgcacgtttgttcctgccccagatgtgagaaagttaagaaatgttcaaatctagtcaggcatagtggcatgtatctgtaatcccaacccctgggggatggaggctggatcatgagttcatcaaagtcagtctcctcacacagtaagaagccgcctagccacctaggttacaaggaggagaggtggggtgggaagaaggggagagaggagagagagagagagagagagagagagagagagagagcgcgcctgagcctgggctcaggctgggaaagtgtgtgagggaaggaggttgcagatccattcacctacacctccattgaagcctaccacctagcccttccaaagttctttggatgatggatccttggggcctgagctgtcctggtctccctcctcctcaggtctggttcaagaaccgccgggcaaagtggcgacaccaaaagcgtgcttcctcatcgaggctcctgcctgggactaagaaaactcccaaggagagttgttgatgctgtccggagtttatctggctttatgaagtagagcacaaggaaggaggagggggacagacctacctgaacaggaactaacgctgccagcactggcagccaggggatccaaagccgccttctcacccatgaagggagggcatgtggggcaggaaccagagacctcctgcaggtcaagtgcagacacagagcaggtcaacttcctcagccaccctcagcacctagagaagccctagctccatgcaggacgaagagcctaactccccacctcatgcctgtcaccaagactggcctcttctctgtccttccaccttcttatgcaaggcagtggtgtctgctcagccctgggcgtactctgtcctcacaggccctgcactttagggccctggtgtcatgacctgtggaagaagaaggttgtagttggtagtttccagattcctgcatctgctccttcacctcagccttgagctgatgccaagaaataaacgagatcttcaaagaccacagaacagtccaggatttcaagtccctgtgtctcaggctttgtttccacaccaactgagggactggctccattgtccctttccagagagtttgggggtggggtgtggatcaacatgtgttgcagagcacagctcaacaagtacccagtcccagtaccatgtctccctcgtcagaattaaagccggtagatggtggcaaggcctcctggggatctgggcctctaggcactaccaaccagcttcacagatggggggaatctttggctgtgtgtgtggatgtatgtgtgtgagtgcatagctgtgtgtgttgcctgtatatatacatgtacatcacatgtttgcctggtgcccatggagatcagaagaggatatttgaatccctgaaagtagagttatggatagttgtgtgtcactgtgtgggtgctgggaactgaacctagatcctcgagaagagcaacaaatgcttgtaacggatgagccatctcttctgccccctccatactcttcttggtgtatcttttccatccttaggctacagttcccacctctatgtctccagtccaggcctgtcccctgaggtatttgtcagtctgtacctctgacaacacctggaagcccacaggcttgcggcaggcaccatatatacaacaggccattttcccattcactgtcctgctaaaggcacgttaaatcatagagttcttgatcattaattgctattattaccggatcatacccagtccagccgatttcacctttaaacatatcaataaccccccagaaactagctcgtgtgcagcttcaggcgcaccaacctcatgaaagctgcattcccttgcatggtaaccattgcagctttctctggttttcacctgagctcacttaaaataatgtttcttgacaggactccaaagatactgtgcagcctggctctccccctctggtgtcatctccttctttagcgcactgtgtgactaaaggtctgttttggcatttgccttgctccaccccgctgctgggccttcccattgcctgatgcccatccattcatcttttccatctacaaccatgttctgcctggggaaatgccacttgacatgtcctgtgtagcagttgagattctctgagtgcagacttattgcaggtcacagttgtaactttacacactggcagcatgatttaacatttttctactgtatggtcaactctatggatgcagggacatggtcataaagtccccagtgactcacaatgaaggacaagatcattggaaaagcaaaattgtaatgaatcattctgggctagagcttctcccacctaattcatgatctcccttaggaagaaagttccactaatgctttcagtgagaagcccatcctggcagacagggaactaataaatccaaccagagatttaagacccttttgttctttcttttcatttaaattttgttagataagtatacgggaagaattgtcttagtgttctttttctgagtttggaagtcataaccaaattttttgaagtatttaaaaatgtctttgaagcatctgcatttttttttttttttaaagaattggaacttttaacagagggactgtggcgtcagtcactctacagctccccctagtgatcatagtctagatgggcatgagcaacgcgggtggggataaaagactacaactttcttaagatccggcgctcccagtgacatcattggagcgccggctttgttacaaaaatactgcttctccattggctggctgttggagcggtgcagacgccgcccgagcgattctgggatagcgatggggacgcccgggacctcggcgggtgctctgtttctgtcctccgcgtccgcgccctcaaggaagcgcgcggctggggaggctggagaggccggagttgcgagaagcaggcagcgggtcctggatgaagaagagtacatcgaggtaccagctcagtgcgagcgctggcgacttccgggcccctccccctattcgcgttcctgtccagtcctttgaattttttctggtcctggcactctcagccgcccttggaagtggaacaactgtttttgggttggaaagcattgagaaccaagaaaacaatgcagaagtgggcatccagttttctgttgagagtcaaggaaatagtttcttgtataggtagaattttgacacgtttttcgagagatggtgaagacgactttttggaaggctgtaaagtgtcaaaggctgggggtcccggaattagacagtggaactggcttcgtcattgagtgagtgggtctcagttgctcctcgagttaagggtccaactgcaaacacgctggaggacagaccgacatagggttggttttagactggttagatttaggatgcttctgggatatgctgccttgtaccattgccgtgcagctgactgtacagactttcagcttcacagcaagggcgggctggatctgaaatcttgaggactttttcttgtggtggcgatagtggcgactggctttcaagagaaaggtttagattgaaatacaaattcatgggtgggtggaggatgacaatatccacattagtctggctggtgttatagatggagccagcaaagagaaagatcagttagtgagggatttcatgggcttcaagagattgttcagtagttaactggtacatcagagctatgtgggatgacagccttactagaaaagacagttctaaacctatcttgtagatgacagttgtccagctaggcagaagggaaaggtctaaggggtggaacatggacagtggtggattgtgcgtcaggactcccagatgacaactctggcctttgttctgattgctcatggcagggacttcagacagttatccagagagacttcttccctgatgtggagaagctacaggcacagaaggagtacctggaggccgaggaaaacggagatttggagcgcatgcgccagattgccatcaagtttggctctgccctgggcaagatatctcgggaacctccaccaccctgtaagaggacgggtgctgctttagagggcttagggaaagtctgttatcacgtaaggctcactctaatttctgatttgcttctctcagatgttactccagccacctttgaaactcctgaggtacacccaggctctgctgtgctgggcaacaagccccggccccagggccgagacctagatgatggtgagtgaactccctcttttagtctcatagtcaagactacttgggaattgtattcttgtgaattttctttttttttttttttttttttttttttttttttttggtttttcgagacagggtttctctgtgtagccctggctgtcctggaactcactctgtagacccaggctggccttgaactcagaaatccgcctgcctctgcctcccgagtgctgggattaaaggcgtgcgccaccacgcccggctcttgtgaattttcttagggtcacataagtatccacttttgggatcagagacactggtctgggaggcagaagagcagaggccagctcccgggtgtggaggtactgtgttctctgcctctggcctgtctctagaaagagagcccagtaccgtcccagtctgtgttcagtgttccagccttgtgagctttgtctcctgaaaatgccttaggctcctctaccttctttcttccaaggcagtcacttgtgtctctcccttcaggtcggtattcaattgttaactgtttgggcttagaggcggaagctaatctggacactgggttcttgaacttttgtgtaatgttggagccacctgggcctctgtttctcaccgagtgcctttagttttctgatttgtttgttttgttgagaccagagagtctcactgtgtttccctcactgttcagtgggtggggggtgagtgggtgcagggggagcatttctgtttcttgcctctcaccctaattactacctggtgagccctcccagagagtagggcctaggtcttgcctccacatttagagtatcatgtggtataccattaagacacacatgtagaacagatgagtgtttgttttcgacatgtttccataccaagtatgagatgtatcttaaggttaggaggaactctataaatctatttatatgtgagcgttgccactaagggacttgtctgggtctgtagtagaatgtatcactagacatagacaaaggcgtttctgtgccaggctctagtggacagcatactgtactagagcgagtgtgcagcatgctcacacaaacgtgttttctcaacagcccagcctttcctgccagggacatgctatggtggtagttcttcttggagcttgacccttaattgaactacagcagagaaataggacaatttgaaggtgttttctttttatacatatattttaccagtagccttggctggcctggagattgctctgtagatcaggctaacctcgaactcaaatagcccatctgtttttgcctcctgagtgctgggattaaaagcatgctccaccaccacctggcccaaggttacccttttctaacctcaggacttgaacttagaaccactgtgttaggcattggctggtggtcaagactgctagtagaacagatgagaaacctccccttcacacagccccctgaaacttgcagtgctgcatcttcaagagtatcactttcctcggtagcagggatcaaggtggtatggttagctttttggcccagggactgtgtggtgctccgtggagccctgggccatatgggctcctgccttagggattaactgtcataccctgaggcatttgtggccaccactcatccataatatcagtcagaaaggaaagggaaagataattccaggaggaaagaagagctcatgggactgtagaggtagatcctacaggattaatacactttgggcagaggaagagcctactaaactgtcgtcatgtatctgaccctgccccttcatgagtcaacccgatcccagacttctcttggcaactagcagatcaatagaactggccagttggccatggttgccacctgggtttatctgaacagtcggaattagtctgtcacctagcaggagctggggttgtagcccttatgaagtgggacggtcttcctcagccctgcagtgctaatcatgcagtgtgtgtttccctacttgtgacctcttagcaggagaggctggagaggaagaggagaaggagccactgcccagcctggatgtcttcttgagccagtacacaagtgaggacaatgcctccttccaggagatcatggaggtggccaaggaaaaaagccatgcacggcacgcgtggctctaccaggctgaggaggaatttgagaaggtagccctggagcttgaaaacaaaggcaccttcttttgggatggagtcccagggccacaggtacaggatctgggtgcctctctgaccctgctttccccccatgtcactatagcgacagaaagataatcttgaactcccatcggcagagcatcaagccattgagagcagtcaggctggagtggagacctggaagtacaaggccaagaactctctcatgtactatcccgagggtgagtgaacaaggcagaagacaaggcctatagtggtctgtcttgttacctttgagccaggttggggttggggcaatctgtgacgcttttgggacattgtggtcttccctactgctttgttgagggtttgtgagctaaggtggctctactctgccttgccaggggtgacttagctcaggaggtttatctagccttgaggctgcatgacttgtaaggctgaggtgaggcatggggctcaccccccacttggagccctgctaccttgttcttttgataggtgtccctgatgaagagcagttgtttaagaagccgagacagatagtacataagaacacacgtttcctccgagatcccttcagtcaggctttgagcaggtcccagcttcagcaggcggctgccctcaatgcccaggtgagtaagcagagtcaccaggcagctgaccagctgcgttgggaaaactggagaggtgtggcttctcccatcttggttgtccctttaagttagggtttttctgaggctagatggagcttaattgtcagaactgctacagcccctgtgtggcaggacctgtatcttgttttggccccttccaatggggctagatatatgacctatggttctagcccataccagctcctatgatgttggccagagaggagagaagtttctagaggccatacctatatacatataccatacatatacataccatacatatatatacctgtgtagcagtcagcgagctgagaagagcgctgtatactgggaagttccagaaagagccaggccactgagatccttcgatcaggatgagtacgtgccctcagagtgtccctgatcatcatggggttggaggcgaggcaggagatgggaacactcagatgccacaggggagagccagcactggccctctgtagcattgcaacccaagaggctcttccttgagggaagggaggggcaacctttacttaatgttcactgcttcagttcctcacgtccttggggagaggtgagaatgggggtcttccctctctcctagagccccagctctttcccagagaggggaagtgcttccgatgtgtacgttagcacctaccatagtcagccgtagagaacctctgacactggtctctctccttctcccagcacaaacagggcaaggtcggccctgacggcaaggaactcattccccaggagtcccccagagtgggcggctttggatttgttgccactccttctcctgctcctggtaaggaatacgttatacgcccaggctggccaggctgtgcacagcctctcccactgggtactggctggttgtgtgtcaacttgacacaagctggagttattatagagaaaggagcttcaggtgaggaaatgcctccatgagatccagctgtaaggcattttctcaattagtgatcaagtgggggagggcccctcgtgaatggtatcatctctgggctggtagtcttgggttctataagaaagcaagctgagcaagccaaaggaagcaagccagtaagtaacatccctccaaggcctctgcatcagctcctgcttcctgacctgcttgagttccagccctgacttccttaagtgatgacagcaatatggaaatgtaagctgaataaaccttttcctccccaacttgcttctttgtgtgtgtgtgtgtgtgtgtctgtgtgtgtgtgtgtgtatttgtgagacagggtttctctgtgtagtcttggctgtcctggaactcactctgtagaccaggctagcctcaaactcagaaatcctcctgcctctgcctcccaagtgctgggattaaagcccaacttgcttcttagtcatgatgtttgtgcaggaatagaaaccgtgactaagacacacgtgtgacctgaaatgcctcaggttttgcttgtgatatgaatgggcatactgatgcacgtatgcacagttcttatatagatttagagagttgtgcaggtggagaggccctggacactagtcccacagtctctgcaagggaatcaagtgaaacccagctgtccttggtgccccaccacacatggcctccacactaggtgctggttgctgtaatataacaccacaaggtgtcacataggaaggcaccatatggttgcactggcatttaggaaaccttggaaagcaagagtgttttcttccattggcacccctggccctgtgctaggatggggtccaatagacccgccttccctgacctaagtacagccatcttgctttggggtgctgctgtttttgaattttcccttcaatttgtgagggaaggaaaggagtttgtctgttggcctcaatggcagctaggcttcatgtattggagagaaagataactcccgcactaggtactccggcctgaggtgtgtgctctccctctgcaggtgtgaatgagtccccactgatgacatggggagaggttgagaacacgcccctgcgagtagaaggatccgagagcccctatgtggacaggacacctggacccacattcaaggtgagttgtgctgagcgggcatcagtctgggactcagtcaggataccttagtaccagctgctcaggactcagcacagacactggacttctgcagaagagggcattacggtaggactgtcaaacagatttggaagagtggaggccatggcaaggcaacaaggcaggtctggaggctacactgtcacagagtcagaccaggaactccagctgccctgtagacagaagggctacgtgctagcctctggttacatagcatagttaaggatacacaaggtagtacagtatgaacccagtattgtaggtgtgggtagaatggaggtcaagacctagagcagaccagaaagtccaagtcagatagggcgtggtgtacatcatgtggcccctgtcaggtggcccctgatggcatggatgggtgggtgagcagatagacgccctgagagctatggggaggaaacacacagtgtccaaggctatcgggaatctgtggatgagacagtgtctggtgtagtttggaaagtgaacaaagaaaggtccctgagacttgagagtgtacatactatgagggtgctgggcctcagtgactcatggtatgcatgggcaggccaagaatgtgaatcttctgaggaaacccaacaggatcagatttagtgtaggataaatgtatagatatgctttagtggctgggtcacagatcattttaagccaggccttccaaactgcctgtgatcagtttggaatgtggtaggaagggatcactttagtgcaacagtggtgtcagagtcaccaggggtagcatagctctcagaaagcgaatgctggcttgttctgtggttctgacactgctttccctgacatggccctgggggtccttcccgagagcagatgtagaggttatgtactacacacctagacacatcatgggtagagattgtggaggtcttggttatagactgtgtctgggatgtaagataaccaatacaaacatgagagaggagcagacaggatgctatgtggcccagggctctgactggttgcacagaaagcaacactagacccgcagtggcctttaccaaggcagagaattctgctctgccggagacagggcagatgtagcctactgtatactttgttgtccaagtgtcaagcagatggaaagctggggacagacaagaaagagtggaaggtatgggaaagatggtgtttcggatggtgcaggattgccaggcctttgcggataaagtaaactaggtcccaagtgtggtaatagcaaagtaagttccaggaaagtgaagacccttactgtaaacagttagaaattaacgtggtttaaactattattgtttgtttgactaattttgttcttgtgttgtgctgggggttttacccaggacctggttccatctcttttagtgtctgaagtgctgggactagctcttgtttatttttgtttcttgagacagggtttcactatgtagctcagatttgccagaaactcactgtgtggatcaaagctgcccccagatcagagatctgcctcccaagtgttgagactgaaagcatgcaccaccactcccagctctcagccccttgttttgccttgttttacatttattcgtgtgagtatgtgtataagcattatgcatggcacatgccacagcacatgtgtggaggtcagagtgtaagaacctgtaagagtcgttctttctcttttcacctacgtggtcttaggggattccaaccaggttgtcagtcttttaacaaacacctttgtccactgagccttttgggggttttgtttgttttttaacacagggtcttactatgtagctcagggtatcctcaaattctacagtctccttccagttgctgggattgcgtaatacaccact

SEQ ID NO: 270 - DNA, 1149 bp, Mus musculus
atgtatatattccgcctcttgcgccgcccgcccgcgggcatggcgactgcaggcagcgcggccagccgcagggaccccgggcgaccctgccctttctccatcgagcacatcctctccagcctgccggagcgcaggcccgcgacgcggccaccgcagcccgtcggtggtcggaaccccgccgagctagacgaacccgaggcgcccgtccccgctgctccttgcgcctgctgctgctgctgcaacccgcgcgctgcgacccgcggaaccccggagacatcgtccgggccgggcttgcggctggcgtggccgctgaggttggcgcccgccacgccctctcccttgacggcgcctagagcaggctccccggcgctgactggcacgagcggccccggcccgcagaggcgcacgcggcgccaccgtaccatcttcagcgaggagcagctgcaggcgctcgaggcactcttcgtacagaaccagtatcccgacgtaggcacacgcgaacgcttggcggtccgcatccgcctgcgagaggagcgcgtggaggtctggttcaagaaccgccgggcaaagtggcgacaccaaaagcgtgcttcctcatcgaggctcctgcctgggactaagaaaactcccaaggagagttgttgatgctgtccggagtttatctggctttatgaagtagagcacaaggaaggaggagggggacagacctacctgaacaggaactaacgctgccagcactggcagccaggggatccaaagccgccttctcacccatgaagggagggcatgtggggcaggaaccagagacctcctgcaggtcaagtgcagacacagagcaggtcaacttcctcagccaccctcagcacctagagaagccctagctccatgcaggacgaagagcctaactccccacctcatgcctgtcaccaagactggcctcttctctgtccttccaccttcttatgcaaggcagtggtgtctgctcagccctgggcgtactctgtcctcacaggccctgcactttagggccctggtgtcatgacctgtggaagaagaaggttgtagttggtagtttccagattcctgcatctgctccttcacctcagccttgagctgatgccaagaaataaacgagatcttcaaagacca

SEQ ID NO: 271 - protein, 212 aa, Mus musculus
MYIFRLLRRPPAGMATAGSAASRRDPGRPCPFSIEHILSSLPERRPAWPQPVGGRNPAELDEPEAPVPAAPCACCCCCNPRAATRGTPETSSGPGLRLAWPLRLAPATPSPLTAPRAGSPALTGTSGPGPQRRTRRHRTIFSEEQLQALEALFVQNQYPDVGTRERLAVRIRLREERVEVWFKNRRAKWRHQKRASSSRLLPGTKKTPKESC

SEQ ID NO: 272 - DNA, 21293 bp, Homo sapiens
tttaactgttagaggaaaaaaaaaccacctgtgacagaatatagtttcttctttaagtataggggtgcatgacttaatccttgcctagcatggcctttggtcctgtttataatttggtatcgttttgccagagtctcttctgtcagtcttatgatctctattttaacattaatgttggtcagttgtgcctaaaccacaaaagggacagggtacagcgaggcatgtctgaccttctgtcctgtcatggctgttaactcagtttttaaggtttctctggggtcctttggtcaagggggatcttttcagttggtgggagtgcttaggattttactttcagttctcaaaagtgagacctgttttgcaataaaggctacatgaaagttcctgaactgcccctaccaagataaaaaaaacagtgctggccgggcgcggtggctcatgcctgtaatcctagcactttgggaggctgaggcgggcagatcacgaggtcaggagatcgagaccatcctggctaacatggtgaaacctcgtctctattaaaaatacaaaaaaatcagctgggtgtggtggcgggcgcctgtagtcccagctactcaggaggctgaggcaggagaatggcgtgaacccaggaggcggagcttgcagtgagccgagattgcgccactgcactccagcctgggcgacagagcaagactccgtctcaaaagaaaaaaatacagtgctgcgtcccaggaaggatagcagagcttagaggtctcagttgaaaattgaaaggatggccgggagtggctggtcatgccttgtaatcccagcactttgggaggctgaggcagggggctcgcttgagcctagtagtttgagaccagcctaggcaacatagtgagaccctgtctctataaaaaaacacaaaatttagcccggcacgatggtgcatgcctgcagtgccagctacccaggaggctgaggcaagagaatcaccagggcccaggatggtgaggttgcagtgagtgttgatcacaccactgcactccagcctgagtgacagatcaagaccctgtctcaaaaaataaataaataaagattgaaaggaggttgcaatgtggtctttagcaaatcccagtttaatacattatctggctcctgcaaaaaccagtggatcatgttgtttaatcccaaaactagaaggacacgctgggcgcggtggctcacgcctataatcctagcactttgggaagccgaggcgggaagatcatgaggtcaggagttcaagaccagcctgactaacatggtgaaaacccatctctactgaaaatacaaaaattagccgggcttgatggcacgcacctgcaatcccagctactcgggatgctgaggcaggagaactgcttgaacccgggaggcggagattgcaaggttgcagtgagaggagattgcgtcactacactccagcctgggcgacagagtgagactttgtctcaaaaaaaaaaagaaggacacttccacaacttgataaagggcacctatgaaaaatcctcagctaccatcacactcaatggtgaagaccgaatcattttcctctaagatcaggaacaacacaaggatgtacactctcgccacttcaattcaacattgtattgaaagctctaagctgggcacagtggctcacgcctatgatcctagcattttgggagaacgaggcaggtggatcacctgagatcacgagttcaagacaagcttggccaacatagcgaaaccccgtctctactaaaaatatacaaaaattagccaggcgtggtggtgcgtgcctgtaatcccagctacccaggaggctgaggcaggagaatcacttgaacctaggaggcagaggttgcagtaggccaagatcatgccactgcactccagctgggcaacagagtgagactctgtctcaaaaaaaaaagaaaaagaaaaagaaaaaagaaaagaaagctctacaattaggtaggaaaaagaaataaaatgcatcagtattggccgggcacggtggctcacgcctgtaagcccagcactttgggaggccaaggagggcggatcacgaggtcaggagatcaagaccatcttggccaatatggtgaaaccccatctctactaaaatacaaaaaaaaaaaaaaaaattagctgggtgtggtggtgcacgcctacagtgccagctattcgggaggctgaggcaggggaatcaaacccaggaggcggagattgcagtgggccaagatcacaccactgcactccagcctggtaacagagtgagactctgtcaaaaaaaaaaaaaaaaaaaaaaaagaacaaaatattagggaacaaatgtaaacaaaatgaaaacttaaactctgaaaactacaaaacattgttgaaagagatcaaagcactaaataaatggaagacatctaatgttcatggcttggaagagttaaatattgttgagatggcattgctccgaaaactaatctacagattcaatataactcctattaaaatgccagctgaagccaggcatgctggtgagcgtctggacttccagctattcgggagcctgtggctggaggatcacttgagcccaggagattgagaccagtctgggcaatatagtgagaccttgtctctaaaaataaaaaggcaaaaaacgggcaggcgcaatggctcacacctgtaatctcagcactgtgggtggctgaagtggaaggactgcttgaccccaggagttcgagaccagcctgggcaacatagccagaccttgtctcaattttttttttgactccctagtagctgggacacaggcctacgccaccacgcccagctaatttttgtatttttagtagaaacggggtttcaccatgttggcttggctgctctcgaactcctgacctcaggtgatccgcccatctcagcttcacaaagtgctgggattacaggcatgagccactgtgccaggccagcaagaccttgtctctacaaatatatatatgtgtgtgtgtgtgtgtgtgtgtatacgtatatatatattttttacaattagccaggcatggtggcatttggctgtattcccagctactcaagaggctgagatggaaagatggcttgagccaaggaggtcaaggctgcagtgagctatgatcatgccactgcactccagcctgggcgacagagtgagaccttgtttcaaaaaaaaaaaggtaaaggctgggtgcagtggctcactcctataatcccagcactttgggaggccgaggtgggcggatcacctaaggtcagaccagcctggccaacatggcaaaacctcatccctactaaaaacacaaaagttagccgggcatggtggcgggcacctgtagtcccagcaactggggaggctgaggcaggagtatggcgtgaacctgggaggcggagcttgcagtgagccgagatcgcgccactgcactccagcctgggcgacagagcgagactctgtctctggaaaaaaaaaaaagaaagaaaagaaaaagtaaaaactgcccacagaatgagagaaaatatttgcaaatcatatatctgataagggactagtatcttaaatatacaaagaactctcacaaaccggtaatgaagaagagacaaaaaaaaaagcagcctctgggagcccagcggcctgggatgccagagcaactcctccaaggcgaagggcgagcgcccagctcctctcaccactatgaaagaacacaacagggtgaggcttctttgcgatttggaggcggaaaaaacttgggaatactgcccaagaaatttgtgggtgatatggaggatgccagcttttagtagagcctagggcagtatgggatttgctgcaggtccaggctgtggtaccagcagccctgagcctgaccctgtgacctgacagagccatggccaacgcttggcagagaaaggtttcatgtggcgccttcagcaggctgcagtggaagggtggcagtgcccactcctagggttctggagcaaggccatgccacataccattcacaaaatagccgggcgtggtggcaggtgtctgtagtcccagctactcgggaagctgaggcaggagaatcacttgaacctgggacgcggaggttgcagtgagctgagattgcgccactgcactccagcctgggagacagagcgagactccatctcaaaaaacaaaacaaaacaaaacagctccttccacgtttctgggccctggcaggaactgggcatctgacgatgggctactgagtgaccagaaggctcattagagctgggtattgtcagagacacccactgggtcttttatttattttattttattattttattttattttgagacacagtctcgctctgttacctaggctggagtgcactggtgtgatcttggctcactgcaacttagcctcctgggttaaagcgattctccagcctcagcctcccgagtagctcggattatagatgcctgccaccacgcccagctaatttttgtatttttagtagagacggggtttcaccatgttggccaggctggtctggtactcctgacctcaggtaatccacccaccttgtcctcccagagtgctgggattacaggcatgagccaccatgccaggctttatttattttattttttgagacagggtcttgttctgttactcaggctgaagtgcagtggtttgatctcggctcactgcagcctcgaactcgttcaggcgatctttcaggcgatcctctcgctttagccttctgagtagctgggaccccaagcacatgccaccacgcccagctaatttttttatttattgtagagacaaggtcttgctatgttgcccaggctggtctccaactcctgagctcaagcaatcctcctgcctcggcctcccaaagtgctgggattacaggcgtgagccactgtgcttggccaagccaccaggtctcaaggtaccaaccatccacacaacagaagtggcattacgaggatcagctctcagcaagtccagaggacacacgtaagctgtgaaagcaggtgactgccatcccatgtggcctcacttatgacatctgccccacagctcactcaggcagccctgaacggcagtggagcatgagggcaaagactcccaaacggcagagtttctgtgagcactgtgccatccactctgcaaaggcagaacctgcaagacccaccagctgtagcaaatagttgagctggttggttcagggacctggacagagcaagattagaagttaagagatgagggcctggtgcagtagctcactcctgtaatcccagcactttgggaggctgagatgggcagatcacctgaggtcaggagttcgagaccaggctgggcaacatggtgaaaccccatctctattaaaaatacaaaaaattagccgggtatgtcagtgcatgcctggaatccagctactcaggtggctgaggcacaagaattgcttgaacctggaaggcagaggcaggctgcagtgagccaagatcacactgctgcactccagcctgggtgacagagtgagactctgtcttggaaaataaaaaaaaaaagaaaagaaaagaaaagaaaagaagaaggagaagaagaaggaggaggagggggaggggaaggggagggggagggtgagggggaggtgagggggaggggagggggaggggaagggggaggggagggggaggaagaggaaggatgttaggagatgaggacatcaagagaagtacctgaagctccagggtgatgagtcaaggtggctcacgcctgtaatcccagcactttgggaggctgaggcgggcggatcacctgaggtcacgagttcaagaccagcctggccaacagggagaaactccgtctctactaaaaatacaaaaaaattagttgggcatggtggcacacacctgtaatcccagctactcgggaggctgaggcacgaaaattgcttgaacccaggaggcggaggttgcagtgagcagagattacaccactgcactccagcctgggcaacagagcaagactccatcttaaagaaaaaacttttctttatagagatgagggtcttgctatgttgcccaggctggtcttgaactcctggcctcaagtgattctcccacctcagcttcccaaagcattgggataacaggagtaagcctccatgcccggccctaaatcttgctttttgaatcatatcttctttctttttattattggtagctagaagaagccaagtagcaccttgaactttctctctgggtatgtccttagatcattttattcttgggaatactatctagcttctatttcctatttggctacaggtgacaatgttgctaaacttcctgccactgcataacaatggtcttctttcctccatcttccagtaacaatttcttcactttcctctaagtccccactgtcagcctctgcaaggtcctcccagctcctggacactgccccatcccaaagccaatgtcacatgatttaggttttgtatcagcagcacccaccccacttccagtaccagatcccgttctgcttatctatagttatataacaaaccacatcaaacttggtgcagtaaaaacacccagcatcatctattttattatatttcatagtcatggggcttgactgggctcagggaggggattctcagttttggtgtctcctgtggttgcagtccaatggtggccggggccagagccatctggaaggcttcctcactcacttgtaggtgacccgtgcagggggtggatgggtccttcagctggtgctgctggcaggaacacgcctatcctctcccgaggctgcctgtgcccctcacagcatggtggctgggtgtaaagatcaagcatcccaagatgtgtgagagagagagaaggagttgggttgctgatctgatctgtgtgactctgtgtgtgacttggcctcagaaaccacacgatgtcagttctgctgcattctatggattacaagcaagtcgtgaaggccagcccatgtttcaggaagaaacccaattaaactcccaaagggagcagcatcagagaacctgccagcatgtttcagaggcgccagagtggccaggcacggtggctcacacctgtaacctcagagctttgggaggctgaggcaggtggattgcttgaggtcagaagttctagaccagcctgggcaacatagtgagaccctatctataattttttttaaattagccaggcatggtggcgtgtgcctgtgctcccaactacttgggaggccgaggtgggagaacctcttaagcccaggtgttcagaggctgcagtgagctatggtcacccactgcactccagcctgggtgaaagagcgagaccctgtctcaaaagtaaaaaaacaaacaaaaaaggccgggcgtgtaatcccagcactttgggaggccgaggcgggcagatcacaaggtcaggagatcgagaccatcctggctaacatggtgaaaccccgtctctaataaaaatacaaaaaaaaaaaatagctgggcatggtggcaggcgcctgtagtcccagctactcgggaggctgaggcaggagaatggcgtgaacccgggaggtggagcttgcagtgagctgagatcatgccactgcactccagcctggacgacagagcgagactccgtctcaaaaaaaaaaaaaaaaaaaaaaaagggaggggggcaggccaggcaggcacggtggctcatgcctgtaatcccaacactttgggaggctaaggcaggcggattgcttgagctcggcagtttgagaccagcctaggcaacgtggcaaaacccccccaaaacagaaacattagctgagcatggtggtgcacctgtagtcccagctacttgggaggctgaggcaggaggatcacttgagctcaggatgccaaggctgcagtgagccatgatcacaccactgcactccagcctgggtgacagagcaagaccctgtctcaaaaaataatgcaaaatagaaaataaactttttgaaaaagtgccacagtgggccatttaccaaggtggactggtaaagaggcagggcacacgcagaggcaaataggtagaagagaatgagcactagagatggacaggtgggcagtggcccatttgtaaaagtggagaacatagggtaagaaagggattttgagaagaccttgagttcctttctggcatggtgactgggagaactttattggtagtggagatggagatgtggagcaggctccagaaacaagagcgtggagcagagagagaggccaggctggaggtgcacttgtgagtcactgtcacaaagatggtgtctggagctccaaggctggaataggtattgagggtgagaatgggaaaggatgaaggaatggccagggctaggaggaagagggctcagcaaatgttgggctggctctcctgaccaatgaccctgcctcccccatcatagcagcactctgattttggaggatggtccagatgcagttctgtgagggaggtctgctgagggaggagggatccatggccatccaaagggccatgggaggagatgaaaagtgtggggctgtggcagccattctaccaccaagaggtgggtggaggaggggttgacagagccactcatggaggtggcagctcatcactgagcctccagactacccctgggaaacctatgtgggagctcttgtgacagaaattaaatcagcaggttcggtcacagtgatgtccacagcactttcactgatagcagagtggggatggcagagtcttgcagaggggctggcggcgggaggagcgcaggaatacgcattgccctggggaggcggccaggttctaaccgtctcacacctagtcactacactttacagattgggaaagccaagcccagaggctgaagacgcctatggaggtcacacggccagaaattgacaacggagtatgagccaggccgtctgtttctctgtgctatgagtcccatactgtattttcaaaggtcaagaggaaagggtcttaagctgaagtgacggtcccgctgccaggagccgcttcactgagggtgaaacaatgtagccaagtgcgggtcacctgcgctgtggcagaagggaccgaggacggtgtggccagaggactggcctgggcggagagcgaggagggggagcccacagcttctggggggcagtgacagtgcggggaagggcgaggtgcagtgttggatgttttcgcggggattctgggaccagtgggaaagctggaggacaggcggctctgaagcaccgaggaggggcctcggaaggggcggggaggtctccttgacacaggtgaggagacggagaactgggggcacccggcagcccaggcttcctgccgcgctctcacgccctccagggccatgagaccctggctccgaggtggcgggcaggttcgggacccgagcgcggcgggatcgtgcggttgccggtggtgctgggccccatggaggctgcggtccaggagtttcgggtgggcggctaggccgagcttctgcaggcgtgctgagccgccgcagtagggccccagaggggacgaggaattaggcccagccgaacgagggggagccaccagaggctgggccgggaggcaccgccgcgctctggggagctgccagggtcggggcgccctccgagcggctgccaggccccgcgggcggcggcgagccggccctccgccccttccccgcaggtaagccctgccagcttgagcggcgggcgcgggtggggcaggaggacgcggggcggggtggggggcacagggggccctctctgcagcgcccccggcccccgcgcgcggaggcagggccgccgcagtcgaggattagcgcgttcgcggccggcgctgcgggattaacccgcgtggactggacgcccggcccggggattactgcgcgctccctccccgacgtatatattcccgcggcggcggcgccccggccgggccgggcatgtcggcaccggctgggggcgcggcgagccgccggggtgccgggcggccctgccccttctccatcgagcacatcctctccagcctgcccgagcggagcctcccggcccgggccgcctgcccaccgcagcccgccggtcgccagagccccgcgaagccagaggagcccggggcgcccgaggctgcgccctgcgcctgctgctgctgctgcggcccccgcgcggcgccctgcgggcccccagaggcggccgccgggctgggtgagtgggcgcggagcggggcgcggggcccggcggagcccggggcgcggcgcagtgggtgccgagcttggccccagccccgcgcctcaccgcgccctcgctccgcaggcgctcgtctggcgtggccgctgaggctgggaccggcggtgcccttgtctctgggtgcgccagccggaggttccggggcgctcccgggcgcggtcggcccgggttcgcagcggcgcacgaggcgccaccgcaccatcttcagcgaagagcagctgcaggcgctcgaggcgcttttcgtgcagaaccagtatcctgacgtgagtacgcgcgagcgcctggccggccgcatccgccttcgcgaggagcgcgtggaggtgagtgccccgcccagcctttccccggagcgcgcgggccgcggctacactggactggggtcctggcgggcgggcgccctttgcaaagacggcctcggcccaagccccgccctggcgcgccggagggaggaggtccctggacggcgctgggcgtccgggggtatgaggagcgggtgagagcagggaggtgccgcgggaaaggaaccggagggctacttttcttttcttttgttttacactttcctctggtgacgaaagaggcccgcgttcacgtccagaatttgggaaattcagaagagcccgcaacccaagaaggggcgtcctggtcgccgccagctggaggctggggcgggtactaagggggttcccatctcgcgtccagacccaccgagtctgtccgcagcgaataagggcaggtggcgcgcagccgcggcccgggtgtcggctctacagcgccgtccgcccacatccctgttgcgaagctcccctctcggtccctgtgggaccctcgggagccggtgggacgcaggacctggggctagggctgagcattccccccatccccaggtctggttcaagaaccgccgggccaaatggcgacaccagaagcgcgcgtcggcttccgcgaggctcctgcccggcgtcaagaagtccccgaaggggagctgctgatgactctaggagctgcccctgggctcggccaccctttttgggatctttggagttggcgctgagagaagacaggtctacccgaaaaggagctgggagagtacaccggccgcctccacccgtctccacagcccttgcctcctgcagctcgtgctgccgtggcgctggggacgggcccccggtgcttggtgttccacggcagtgggagtggcgagtcccttgggggtgggctggggcatagagcagtttcctcagctccctaccccccgagagacactaactccaccgcaggaggggaaccaccccgtatcaacacgggacccagaatcctacgcagtggagcgtctctccgcaccctgggacatgctggccaccctcttctcaatgtggacattgacctaacttgacctggctcgtcctcccccagcgggagaggggatggggttcgtgtctgtgcagtcctggcgttgcaggcttcccaggccctgggctgggtcttggtatctggacctgtagaataagaaggtcgcaggagcgattccaggagcccctccacagtcccttcaccttcgagcctcgcgctgatactgagaaactagcaacttcaaataccacagaagccgcccagagtctcaagtccaccttggctccactcccacacccaacaaggagctgtcccttcttcttccttcccagcgagggggtatttagggtacagctgtctttgagaggagcacagctcagcgatcctcagtctctgcaccagggtgctccccagcagaggggactgctccacggatggtggccttggacccctggggtccagccctggcctctaggctactgtgaacctgcccatgggtgagggtcccctgcttcctcctggggttttcatgctgtgggctcggactccctcacagcaatctgtgccatcctagggtagggcaagaggaggttggactggggagaccccgcccctgctgcctgggaagatgcctgccctccccttctttatcctggcccatggcaaaaggcacagtggaaagaagccttagattccccaagtaggccctacagtgggtccaaagcatctcacatccccacccccagctggcttgagcacctcgttctgtctccttacaggccctgcagggaatggggccattctacctgcaagagatgaagtccatctctaaaagcaggactgcagaagccagggctgcagctccccagacaccccaaggctggccagcttggataacaccaagcaagcatggtgtccccagtcagaactgccctgacactgctgggtgtccctagcatccccgcctccacccctagcatgcacacaaagcccttctccctgaaccctggtcttgcccttggggactgaacagactacctgtggacatgcccgtgtcccagtcagctcccttgcagctggggacactcgcatctcacaggctccaggccccttgagttccttggttgaatggccatctgtcattgttttgggagccccgatcagagcttgtggagcgccaccttccagggctcagtggctgtgttgctctcctgaatttgcttcttgagctctagctgctccttggcaggctgaccccccacagcaggctattaacataggcatccttcacgctcacacccaggcgctcgcttctcatcttcaccctcttcccggtttatcttttaccctcagactccaattcccatctttctgccacatttacatctcaagccaggcacttcccctgagccaggtatttatctccagctgtccccttgaagcccacagactccttaaggtcaccttgtccacagtgagctcttctgtgcaaaccaggcacatgagccagagagctagccgcccacccgaaactggtccctggacccctccctctcctgatcatccactatacccaggctgacaggaagtcagttttactgtttatcaataaatcaataaatcccagaatctctccagctctaactgcaccagtctgatgtaagccaccgtcacctctcaccttgaccactgcaactgtctctaatcttgtccacctgcaccacactggctctgcttttttgtttgtcggttggtttgagacaaggtctcgctccatcacccaagctggagtgtagtggtgcaatcatggctcactatagcctccagctcctgggctcaagcgatcctcccccatcagccttctgagtagctaggaccacaggtgggcaccaccacacccgactaacttgaaaagttttttgtagagatgaggtcttgccatgttggccaggctggtctcaaacttctgacctcaaactatccgccggcctaggccttccaaagtgctgggattataggcatgagccactgtgcctggcctgccccttcaattcagaatgaagacaaaccacctcaccataccctacaaggccctgtgcagcctggccctgcctctctggcatcatctcacacctcactgcactctgcatttccaaaggacttctttagaacttgccttgctccctcccaccactaggcctttgcacatgctctttccacctgactgttgccggtttgttcgtcttttgaatctgcaatcactttctgcctggggaagcttctctgacctcccgaactaggtcaagattccccaagtacaaactcttttcttgcacggacacagctgcaattttacacctgtttgtgtgatgatctaacaagtgtctctgtcttccccattgcactgtcacttctacaagggcagcagcagcacgctgcacttcagtgaatgaaggtatccctgtatgttgcaaaagcaaaattgtattaaattgttccagggcggaatttatttgtccaacacaattcacatctttcgtttgggaagaaattccttaaaaatgccgaggcaattttctggttcacttgaatattaatttttttttttcttgacagagtttcactctgtcacccaggctgtagtgcagtggcacaatctctgctcactgcagtttccacctcctgggtttgagtgattttcctgcctcagcctcccaagtagctgggactacaggcacctaccaccactttgtatttttttttttttttagtagagttggggtttcaccatgttggccaggctggtctcaatctcctgacttcaagtgatccacctgcctgggtctcccaaagtgctgaggttacaggcgtgagccaccgtgcctggtcttgaatgagaatgatccctcttctgggaagcccactctggcatttgggggcccaataatcttttttttttttttgacagagttttgctcttgttacccaggctggagtgcaatggtgcaatctcagctcactgcaacctccgcctcctgggttcaagcaattctccagcctcagccttccgagtagctgggattacaggcgtccaccaccatgcccagctaatttttttgtgtgtttttagtagagatggggtttcatcttgttggccaggctggtctagaactcctgacctcaggtgatccgcctgtcttggcctctcaaagttctgggattacagaataatctttagacatttcttaatcgaaccactgtcttgttctttcaccttttgttagataactataaaaaaaaaaaaaagattgttttggccgggtgcggtggctcacgcctgtaatccagagaccagcctgaccaacatagagaaaccctgtctctactaaaaatgcaaaattagccgggcgtggtggcccatgcctgtaatcccagctactcgggaggctgaggcaggagaatcccttgaacccgggaactccggtgagccgagatcatgccattgcactccagcctgggcaacaagaccgaaactccgtctcaaaaaaaaaattgttttaaggcccttttcttgcataaagcttgaaactcctatataagtaaatttcctggtttgtatttttgtagaataatctcgaagcatacatagttcttatttgtgggaaattagaattctaaggcctttggacgctgcaaagccagaatttctcgcgtgaagaacacgccctatagcatcctccccgccacctccacagcaccccctcgtgttcacagcattgacaagcatgaatagcgcggggcaggacaaggactacatttccaataaagtctagcatttatagtgacgtcagaacggagcgcgggctggctttctagagccacagcttttccattggccaactattggaggcgcctgcgcaaatggtgcagtcccgccccctccaccctgtgacgcgcctgctgggcccgagctttttcctgggatagcgatggagacgccgggcgcatcagcgtcgtccttgttgcttcccgccgcgtccaggcccccgaggaagcgcgaggcgggagaggctggggctgcgacgagcaagcagcgggtcctggacgaggaagagtatatcgaggtacgacctcggtgcggacgccggcgacttctgggcccatcctctgcttcaagctcctctcaggttccctctctcgggtgttgacactccgtctcctcgtggaagtggaggagccgggtgtggacggtcccacgagtcaagtaaacagggcagaggaagacgtctgtggtggaagaggctgtagtagtgttgtcagggaaaagagagagcggctctctttgtatgggacgggggtcagggaaagaagattttctgttaaagtgtgagtaggagtttgacaaactggaaggatggtggcaaagagggctttctaaagagcggtggcagcaagtgtgaatgctggggttcctggaaagagaccgcagttgtgacagcatctcgagtgagtggacctgcgtcgccccaccacacgcacacagaaggaggagctgaaacggggattggcggaagtcagtttggttttagacctgtttaattcgggacaccttttgggatatgtagatggatggctttaacggacggttgggtgcccagatatgcagctcgggagcaaggtctggctggaggtgcagacttgggaatctcaacttgtggtagtgactggctgaagttactcaggaaaaaggtttatttttattttattttttgagacggagtctcgctcgtcgtccaggctggagtgcagtggcgcgatctcggcttactgtaaccaacctctgcctcctgggttcaagccattctcctgcctcagcctgccgagtagctgtgactacaggtgcccgccaccacgcccggctaatttttgtatttttagtagtggtggggtttcaccatgttggccaggctggtctcgaactcctgacctcaggtgatccgcccgccttggcctctcaaagtgctgggattacaggcgtgagctaccatgccccgccaggagaaaggtttagattggaaatagaaagtcatgtgtggaatgaaagtgacaacacccacattggtctggcttgtggggagccagcaatggagaatgagaatgaccagttagcaagggcgagagagaagggtttcacggacttcagaagagtgtttagtaatgttagaggttgcagcatggctaccatatgggatgctcaaccccactagaaagtgccctcaagctccctcaatccagccccagtcattggggaagtagaatttgaaggaggttcagcaagttccttagcatgtacagcagtggacctgtgaggcaggagcacccagactgcagctccgactttcttttttctttttttttttttttttttgagacggtctcgctctgtcgcccaggctggagtgcaggggtgtgatcttggctcactgcaacctccgcctcccgagtttaagcgattcttctgcttcagcctcccacgtagctggaattacaggtgcctgccaccacgcccggctaatttttgtatttctagtagagactgggtttcaccatgttggccaggctggtcttgaacttctgacctcatgatccacctcccttggcctcccaaagtgttgggattacaggtgtgagccaccgcgcctggcctctgactttcattctgatctctccttgcagggcctccagacggtcatccaaagggatttctttcctgatgtggagaagctccaggcacagaaggagtacctggaagccgaggagaatggagacttggaacggatgcgccagattgccatcaagtttggctctgccttgggcaagatgtcccgggagcccccgccaccctgtatgaggaccctgtgggtggcggagaggggaaagcctgctgaactgtcgcttcaggctcactctaattcttatccccctctcttcccctagatgtgactccagccacatttgaaacccctgaggtgcatgcaggcactggagtggtgggcaacaagcccaggccccgcggccgaggcctggaggatggtgagtgagggtgccctctttaagtcacatggtcaggattgcctgggaatcttagcctgtgaggccctgagggggtggtccagagggctgcaggccacatcttgttcctgaggggtcttgcgtaaatagcagcctgtgaagtcaaaggacattggtctaggtggtagaacatctgggtccagctcccacacatggctcgcctctgtgaaatgggactctcaccagctcttgctggcttttctgctgtgttccagccctgccctgtgggcttcatggatgttggaaggccccttttgttactatcctgaagatgcctcagggcctctccatttgtttccttcatgttggtcacttcccagataactgcatggctcactgtgtttcttcctgtagatctctgcataggtgttacctgttcagagaaacttttcttgacctgccagtgtgaagtcacaacaccactggtgctctgtggcttccagcctggctttggtttttcatcacaagacattttattttattttatttcattttattttttattttttgacacagagtctcgctctgtcacccaggctggagtaaaatggtgtgatcccggctcactgcaacctccacctcccaggttcaagcaattctccctgccttagcctcccaaatagctgggattacaggcgcctgccaccactcctggctaatttttgtattttgtagtagagacgaggttttgccatgttgtcccggctagtcttgaactcctgacctcaggtgatctgtctgcctcggccccccaaagtgctggtattacaggtgtgagccaccgcgcctggccaagacataacgttttaaaggcatttctgtttatggtctctttccctaattggcatcccttgcacaagagcagaagctttgttttgctttcatctgtatgctccgtgttgggaacagcacatgtggtgttgtgggccttgcacagatacacatggaacagatgaaagagttgtcatcttcagcatgtttgctgggacacacagctctatatggtaacatcgtgacttgatgggggagtcggtttaggaaagggcactccgagtcctgttgaatgcaagtgttctgcacgccatgggacttctgcgttgtcaggccctcttttcatcagtagtagaatgtcagtgcatgtatagacaaacgagacactctttcttatcagtttgtagactccactgtgctggagtagcacagatgtgttgtgtgtttgcacaaacatgcaaacatgatactttttgctttacaatccagctttttcggccattaacacagtccttgttgtccttgaagcttgattatctgttgaaatgtagcttgtgcatcacagggcaatttgtagatttttttcttctccttttttttttttttcctatagagatgaggtttcattatgttgcccaggctggttttaaacttctgagctcaagtgatcctcccaccttggcctcccgaagtgctaggattacaagtgtgagccatcatgcctagccagtttgcagattttcaatacctgtacacctacatgccagtaaatataggaatccttttcagaacctaagtggtaggaaccatcatcatgtttacaggtgaggaaactgaggctcagaaaggcagtcacttctgcaggtctcagagatggtcagggtttcacttcttatctctctgagatgaatagagtttctgacccctgtcctcatcccgtgggtcttgagcttgtagccactgtgccttgtgcatagcctcacgtgtagcaggtggtcaggactgtcactagacttgaaggcagagctctccaggtggccccaccgaagtttgcaccaccacacgcagcaccagggcaccacctcagtgggagtaccactttccatggtggcagggttggtcggaggggggggtgtttggggttgtggcttagcacctgtgaggccccatccagaggactaagtcatatgagatccctggaattggggctcgctctcaggtcaggatgattaggcgatgaccacccacctgtagtacaggtaccaggaagagaagagtgggtaaggtaaggaaatcctagggagtgagggagagccccagggatttggaggcctggcacccacaggcctggcaccactttggtgggggaggagcctgcctgtgatcacgagctcttgctctaacacctgtattgctttctccagtctgaatcagaccacgtaattcccttggcatccagcacatgagcagagctggccctgaatctgtagggtaccacctgagggctctctgggcagtcagggtgggtggattctgcccccgtggggagtccttggcagtgtgggctttcatgggcagaagccaggaccaggggagaggattccagccctgcatgttgggggctatgattcctgggcctgggtgtcctcctctttcctgactgcaaagggtgctgtgttcctcctcccgcaacccctaagcaggagaggctggagaggaggaggagaaggagccgctgcccagcctagatgtcttcctgagccgctacacgagtgaggacaatgcctccttccaggagatcatggaggtggccaaggagagaagccgggcacgccacgcttggctctaccaggctgaggaagagtttgagaaggtgtctctggggtctggggtgtcacataggcgtaggcaccctctgtggtggttggggagccccagggccatgggtacaatgcccaggggcatctctgaccatcacttttccccatgtgattgcagaggcagaaagataatctcgaactcccgtcagcagagcaccaggccatcgagagcagccaggccagtgtggagacctggaagtacaaggccaagaattccctcatgtactatccagagggtaagtggcgggcctcgcagccaaatggggaggtgttgggtagagctgtgtgtgtctggctgtgtttggagcagccttccaggtgtgtatggccgtgcccccttgcagtttgggcttctgatgggtactggtctgtctaagggtggacaggtctgtgtgaggtcagcagtgagtgagaccctctccagcggcactggggcctgcgttctgctcaatgcttttgttcatctgggagtgacttggccgagaagcgagctcctcatgctccttaggctgctgcccttctgacacctgctgctacctttgcttcgtctgccaggtgtccctgacgaggagcagctgtttaagaagccccggcaggtggtacataagaacacgcgcttccttagggaccccttcagccaagccctgagcaggtgccagctccagcaggcagccgccctcaatgcccaggtgagcaggcgggtcagcagggccgcatgggccaggttggacagggctgcctgggggcaggcatgatctctcccatctctttgagcttggcagagctcagtgagtggaaccatctggggccctgtgcggcaggatcctgagtctttccttggccccagtgggcttcc

SEQ ID NO: 273 - DNA, 618 bp, Homo sapiens
atgtcggcaccggctgggggcgcggcgagccgccggggtgccgggcggccctgccccttctccatcgagcacatcctctccagcctgcccgagcggagcctcccggcccgggccgcctgcccaccgcagcccgccggtcgccagagccccgcgaagccagaggagcccggggcgcccgaggctgcgccctgcgcctgctgctgctgctgcggcccccgcgcggcgccctgcgggcccccagaggcggccgccgggctgggcgctcgtctggcgtggccgctgaggctgggaccggcggtgcccttgtctctgggtgcgccagccggaggttccggggcgctcccgggcgcggtcggcccgggttcgcagcggcgcacgaggcgccaccgcaccatcttcagcgaagagcagctgcaggcgctcgaggcgcttttcgtgcagaaccagtatcctgacgtgagtacgcgcgagcgcctggccggccgcatccgccttcgcgaggagcgcgtggaggtctggttcaagaaccgccgggccaaatggcgacaccagaagcgcgcgtcggcttccgcgaggctcctgcccggcgtcaagaagtccccgaaggggagctgctga

SEQ ID NO: 274 - protein, 205 aa, Homo sapiens
MSAPAGGAASRRGAGRPCPFSIEHILSSLPERSLPARAACPPQPAGRQSPAKPEEPGAPEAAPCACCCCCGPRAAPCGPPEAAAGLGARLAWPLRLGPAVPLSLGAPAGGSGALPGAVGPGSQRRTRRHRTIFSEEQLQALEALFVQNQYPDVSTRERLAGRIRLREERVEVWFKNRRAKWRHQKRASASARLLPGVKKSPKGSC

SEQ ID NO: 275 - DNA, 95484 bp, Mus musculus
  misc_feature (1)...(95484): n = A,T,C or G
agatttaccgatgttttctcagcgccaggcactctaggaagcattttcaattcattactttttctgtctctccatggctctgtgaggcaagtcctgttttcccctcacttttacagctgaggaacctgaaactgaagctcagttttgtatcaggccaacaagattcaaagaaaaaaaggtcgaggtttgagccagccctgctccctagaggacttggcagagctcctgaatcaggctcccatcagcctcctcagactcactcacacagtacaggaagttccctcagatcaggtgggccagtaccctgtacctacaactgtcatctttgattccttctcttcatcccttggctctttgtcctggccctacttgtcccatgtggccccctagacagtggctggcagctcctgactcctgactctcttttggttcctttcatccttctgtagcatcagtttaaaggaaaaaaaaaaagttccaggtaaggcctctgattggctctgtcagatcacatgttcactgtgcaccaggatgggtattggggcaagactgtaagcacaattaaaaccttcagaaatcaccagaagactggaggtggggagggagggctgctgggtgttgactttggccctgtttggatggaacaaggatggcgcctgtgggcgctgacgggtttcttttggttctgagtgatacacgggccctagctgaagtgggcgcagggaggagcagacctaaggcctcagttctgaggtgttgaggaggttgagcctggagaggaaggtggagatggtgttggggatggtgtatagtactgacttgaggcccagcaggaggccgggtgagggggctgtggctgggaagcgtttggcgttgacacgcccagtttgggagtggcgagaatgaggtgctgccacgggctgaactgggaggtaatgcattggagagctgggtactccatgagggacagggtgcgcgctgggaggcagagagctggtgatggaactgtgggtgcaaagagctggggttgtttattccgcgggacttggtttcacagatcagaggaggaagagcagctgcagcttctctggaggagagacggaggccacatgccaccagtggtcattgtgaagtgaaggcctttccccagtgccaatccctcccggtaacactttgcctttcctaacaagcagagggtctaggaagcaggaggatcggcagacagcacagtgctcacccatccctctgcagtcgctgccacttctaatcctctcagatgcttcctccagacatcttattttatattccttcagtccctacttctgcacataacacttttatgatccctctctgtagacattttaactaatttcctttttagtagatattttgaaaaatctttacatctgagcctgtgtctgtgtgcatgtgtgcacttataaataccatggcacatgtgtagaggtcaggacatcttgcaggagtcaggtcgtcaggcttggcagcaagcacctttatctaccgagtcatcctgcccacctctgagtctctttaaacccatagataggccttttccactccccagccttcctttctttctttctttctttctttctttcttttttttttttttttgtctttgtttcttttttctttttttgttttcccccagcctttctaaacagtttttggccccgctcactctggccctgctcagtctgacctaaagatttatttattattatatctaagtacactgtcttcagacactctagaagagggcatcagatctcattatggatggttgtgagccaccatgtggttgctggaatttgaactcaggactcttaaccactgagccatctctccaaccctatcctaggttttctgaatctatcattgtaactacagggtccttggaaatgagagatgatggtaggagcagggtggcagagaaggggtgagggtgagagagactgatggccatcgctagctttggagatggaaggtgctgtgaaccaaggaaaggcgtcaaactctagaaggtggcacaagagggagctcagattctccctagcgtctgtagcaaagaacgcagccctgccagcactctgaccttagtcttagtagaactgccatgacttctcatgtgcagagaggtcaggtaagaaatctgttcttgggctggtgagatggctcagtgggtaagagcacccgactgctcttccaaaggtccagagttcaaatcccagcaaccacatggtggctcacaaccatccgtaatgagatctgacttcctcttctggagtgtgtgaagacagctacagtgtatttacataaaataataaataaatcttaaaaaaaaaaaaaaaaaaaaaaaaagaaatctgtttttttaagccatgaattttgtgttacagaaaacatttgtgctgtgtgtgtgtgtgtgtataagcgcctttgttaaatcaacataattacattattatgtcaatgtaactgttattcacaactgagcctaacaagtttcctttttgttttttttcccctgtacttagtagttgtgtgtgtgtgtgtgtgtgtgtgtgtgtgtgtgtgtgttttaacttgtcttctttgtgcctgttgataattccttctgtaactgtgtgttgaaaatgcttctgtccacattttgaggtctttcctctcttgccctgggtccactcttctctaggcacatggctgtggttgttcctccgtagtcatccttggaactctctctacctattggttgtgactgtttttctgccttcctcttgctcagttcatccctgtggttgccctttaggacaggtgactgagtatccaaatatagtcagtgcctgggttctggttatagaggaggcctagaggctgtccctgccacttgtctggtcgagtggcggatgcacagagatggcggtgcctggcaggcctgtatcttgagtcacgtgtcaggtggttactgcatagtctctcttcagcttcacagcaaaggatcctttcccttgtctcaagtgctggttctcctgtattgtagactcttttcccagcttcctctgaggagagtgtgagaccttgtgtgtctgaaagtgtctttattctgttttcacacttaaatgatgaaatggcagggtaaagaactctaccagaacaggtcagatttctttctttttctcccccttccccaagtcagtgtcttacttgtagccttgactggcctgaaacttgctatgtagaccaagctggccttaaactcatagcaagcctcctgtctcagccttccaagtagctggcatgacagttatgcacagtcatgtccatattttcttctttttaacaaaccacttttattaaatgatgaatagcaacagggcagtggtggcgcatgcctttaatcccagcactcaggattcagagacaggcagagctctgagttaaggctagcctggtctacaggtcccaggacagccaaagctagccaaagagaaattctgtcttgaagaacaaaacagaaccaagaaaatgaggcaaataatcattgggtgcattgtcggacgttctggcagcatgcatgggctcatgggtaatgctgtggctcccttgtctctatttccatcttctgggacaggggtgtgctgggattacagacgtgtgtgctacttcctctgcctggcttttgcttggattcttgggatctgaagtcttgtcaaacctgtgtggcaagcaccttacctgcaaagccacctctcctacctacattgtggtgtttcagtatgtctgtgtcatggtccagtcaggtcaggacaccaagcagtatgtgtgtgtgtgtgtgtgtgtgtgtgtgtgtgtgtgtgtgtgtgtgtgtgtgtgtgttaggaacagtcaaactcttcttatcagctattttgaaatttacaattaattagtgttggccatagttgctctcctgtgccacagagcattgaaagttattctttcacggagctggagagatgacttgacggttaggaggagcacttgcggctcttgcagagggcctggattctgttcctggcccccatgggtgctatgggatccatttcttagagataccacatgctcctctgttctctgagggaacccatatgcatgtggcatacatagtcacattcacataaattaaaaaaataactttttaaaaaggttattacttagccagtggtggtggcgcacacctttgctctcagtgctctggcgggagtggtggtggtgcacacctttgctctcagtgctctggcgggagtggtggtggtgcacacctttgctctcagtgctctggcgggagtggtggtggtgcacacctttgatctcagtgctctggcgggagtggtggtggtgcacacctttgatctcagtgctctggcgggaggcagagtcaggcagcctggtctacaaagtgatttcaaggacagccagagctacacagagaaactctcagaaaaaaaaaaaaaattatacttgtattctggtgtacccctgtacccattaaccacgccttctccatcctgtcaccgctcccccactccatacctactagtctgtaccttatttctgtgagacccacatgtaaaaagctttctccgtcctcgtcctcgtcctcgtcctctctgaggcagggtctcactgtgtggctctggcagtttggaacttgctatgtagaccagactgtctttaaactcacagagatccacctgcctttgcctccaagtgctgggattaaaggtgtgcgccaccacgcccgaccgacttttacatgcagatgacaccttgtgctatttgtccttcctggctgacttatatcttaatctaatgtgctcctagcgcctactccagacgacagttttgttgttctgtaactgaacaatactcagttgggcatgtatcccatcttccctttatttggtacccattggcgggtgcccaggttgatccctactgcaaacagcacctcaggaaacacaggaggacagatgtctcttccacaccattcatctcttttggatccctcctataggtatggtggtgggctgctgggatcctggatcagatgctaaatcattttatccagctggccactgagttttgtgtctactaccacaatgtttgcatttgtagaagttcgttttttaaaagatgcatttatttctaacaatgtatatgtggtcatggccgtgtctgtatatgttgagtgtggacactcaaggaagccagaggtgtcacatgcccagatgctgggggtggctgttccgttgacatgagctctgggagctgaactttgtcttctttaggagcagtctgcactctttaacagctttgccatctttccagccctggaagtgctttctgttctcttcgttttcagcaacatcacattcttgttttgtggctgtagaaaccattgatgtgttttgctacagttggtttggttttattctggtccctatcttacgagtcagaggctctcctaaaatatctattggcccttggctgacctttgattaagaattataggaggcagaggcaggcagagctctgtgaattctaggccagcctggtcttatgtaacaagttccaggctaaccagggctatattagtgagaccctttctccaaagggagggagggagggaggaaggaaggaagggaaggctgggcgtggtggcgcacgcctttttttttaattaatttattaatttattaattaatttatttattatatgtaagtacactgtagctgtcttccgacagtccagaagagggagtcagatctcattacgggtggttgtgagccaccatgtggttgctaggatttgaactccggaccttcggaagagcagtcgggtgttcttacccgctgagccatctcacctggtgcacgcctttaatcccagcactcgggaggcagaggcaggcagatttatgagttcaaggccagcctggcctacaaagtgagttccaggacagccagggctatacagagaaaaaccaaaaaaaaaaaaaagaagaaggagggagggagggaggaaggaannnnnnnnnnnnnnnnnnnnaagaaggagggagggagggaggaaggaaggaagggagggagggaggaagagagggagggaggaaggaagggagaaagaaaggaaggacgggagtggccatatgtgatgattcagacctgaaatcaccactcaggtgatagaggcaagaaaatctctagtttaagaccatcctgggctacacagagagtttcaggccagcctgagctccataatgaaatcctgtctcaaaaattaaacaaacaaaacccaaaacaaacaactgagaccaactaacccagagaagtttattagaagctctgggtccaaaagacttgtcaactgtcaggtcctcgctggtgaatggacaggtggtcctggcccataaggcactggtgtgactcttccgcctttgcttcagagagagagagcggtctggatgcctcaggagcagggtctggctgtctaccactgtttccagtccagaagtcagcatttaagtaaacttacttctgctggctagaatgtcacttctacctgaaccattttggccctccagagaatctgaagtttcagctacagaggctgcaggtgggatggttcttattccagcccctctgttttcacacttgtgaaaacgcttcagtttagtcccacaggtgcctggtgctatggcgacaaggatctattaagaactactcattgaaaatcagcttttacgtgcctgtctctgatttggctgttaagttgctttcgcaatcttgaaattttgttggtaatgtcttttcccttgttaagttcgttcttgtcatttcacatctttaaaaaaaaaaaagagactgctaggttgaagaagactgtaagatgtggagtcgagctgcactgcagtcctctccaggcatggtggcacatgcctgtaatcccagcacttgggtgagggtaggaattcaagttctcagctgcatagcaagtttgagggcagtctgggctgtgttagaccctctcagaaaacaaaggtacaacagaacaggtataagggtagttcggttagcggggttcttggtacacacaaggccttgagtttcatgtctgtcaccacagaaacccagcacgtagggcatactggtcaactccagctcgtgggaggtggaggcaggaggatcgggagtttaaggatgactatttcccctgaagatcaattgatcagtgtgtgtgtgtgtgtgtgctcacatacaatgtgtgtgcaccctgtgtgtgccagccatctgtggaggtctgaagaggatgccatctcctggagctagagttactggctgttttgaggcacctggtgtgggtgctgggaaccagggtcccctggaagagcatcaagcactcttaaccactgagccaactctccagccccaaggataagtgcttttatgctgttgttagaaacattactcagggtcgctatggacatgaaagaattattgaggagataaaaactgctggtggtaatggctgggctcatggtgagggtttctgtggtgtagacttgggcttggtgagaaggatgctgtaggtgctatgggctacaggagctgctgctagcttgggacagtgactcccagagcccatggctccctgtagccaggttagcttgagagaagaatgtggctcttaagtttaggtggacagtgctatgtcctggcatggggccttggcaactaagtggggcattgcctggtcacacactgatgatttcagatgatgctgagggcttttgaggtctctgggtttgacccaggaccactgttctctgtgctgaccttttgtgaagctcaagtgtcagggacgtgggtggtctgagacatttccttcctttcccttctttcctgggtgactgcccttgtggtaggtgccctcgctttcctgactattccctcccttctcctcaggggtcagaggctcctctcaccaaactccagtacaggttcccctgtgtctctcccgaccgtggagcagactaattcccagctcgctttgtgcctggtctgtctccagtgtaagatacttgaagatgcccagtttgttttgcagttttcttgttgccctgaggttccaatagcctggcatgtgggagctgggtgacatcgtgggggtccactaaccccatcaggatctgccagctctgagtccagcattctttcccactgactgagtctttgggctgtcacccacttgtcaaaggtttgatgcggggtgattggaaacatctatggttacaaaggggaagctgggatttgggtgagatcaatggccaatagcaggagggatgcctcttggaatactgggtgggatcagttttcctctcgggctgtgaggagcagtttctgtgggcttggggataaggggatatagcttccaagagcactcagcccctcagagttcagtcatgagatctggctcacacctcagacatgtcccaactgtttgagccttagccttagcagtaaactagggaagagcttggagctttccaaatgaggtgtggtgtcactgtgtggagccactctctttgttgctgccaagctctcaggtatttgggcaaccagccttgaacccagtaccctgacaagcttaatgtagggagtaagggtcctcctttacggagcctctcctgacagagtgcagcccttggacatagcctctccagcagggcttggcttttaacttctaagtccctttctcctggctctgcagtggcccctcccagctccagcttcctcccaccgctgccagtgcagagcccaaactggggcacccacctcccaggctatcacatctctggggaagggacaggcccatgggaaacccaagcctgggcagctcccgttcctggttttccagggagccctggcagagggggctgggaagaaaggcccaacagggaggggagctgggaagcagaacagggaactggaaggggaagggtgtgggtgggctcggatccagcctacctcctactctcccactactgccaatcccctccctggcaggcacacactcaaggcaggggcttggcgctgtctcggggtagggggttgggggggcaggaaccgttgtgtgtctcccgtagtgaagggggttgatttgtggcagtaacacacccaccctgagctgtggcccgaggctcaggctttgttacttcactggcttgcagcccacacctggaagtgggggggggggggggagaagaaagcccctaaaatacagctctgtgcgcgtttggtagagctcaaggcccccagttctgactgcaaatggggccatgagaggggcttggagagggnnnnnnnnnnnnnnnnnnnnggccttgggcctcatccgttggcacccagagagcacagcaaacccggcatcccagaccagcctgggtccgggcctcagctttatcagtagggtgccggtcctgggcaggctgagcaaaatgacattcatttcactacatcctgtggctgctgctcacttcctcctccactcgaggagctgtgtgggggtggggggtcgggtgaggacagattagaaggaaaatgtagctgggctgggggcctctggtggtggctggggtttcccagggactggctggggtgggaggagggtttcggaagtgttccgaggggagaaaagctgaggggaggagcaggaggcctctggcagtctcagcagtggcacaagctacacctttgagtttctgaaagggactgtcatagcacccaggctcttagaggaagtggaggctgcctcagtttctcacactctggagtgctggtgagactgggagaagagaggtcagaggccaggctggccctgggctggaggctaatcttgggagggtctgtgctgtgccctgctgaccaacttctcttccccacaggcagagccgcctgaagcccagcgctgaggctgcacttttccgagggcttgacatcagggtctatgtttaagtcttagctcttgcttacaaagaccacggcaattccttctctgaagccctcgcagccccacagcgccctcgcagccccagcctgccgcctactgcccagcaatgccctccagcggccccggggacaccagcagctcctctctggagcgggaggatgatcgaaaggtgagcaactgagtttggttctttaggagactctgtggctggtgcccaggaaaggagaggggcctgtccccacatgatgacagcttaggggtgccgacctgttgttgtcatgggtcacatatactcctgccaaataggtgcttggctgggaacctgattataagctgaggcaggaatatgaaaccaggcactctggttgcaggaccatagctataaccactgtggtctctgagggtcaactttgaggatcaacaggcccaaactataggtctgtgcagcttcgaggggtcatccttgcagggagaggggatccaaccctgcatttctttgtggatctgccctatactagctgtgagacctcaggtatcattgcacctctgtgttggagttgtctgttggcttctgcatttagtagctttctggggcactgtagacatgaggtgaacagcccacacagatattctagcacgtggctttgttcagatgttcaggagcaagtgacatcatcgacctttggagataatgatgtcccacccacccaggctccaagtaagagtcactgggtaacctttgaagtggctccaggccatggaaccagtgactctgtgttttcagagtcccctgagaggttacctcttcaccctgctgctgaacttcaggttgggatcaagtcagtcaaaagggatcaagatggatgggaacccctgaaggggccacaaaaagtcaccttggagctgtggccactaactccagcactggactctgtgtcccctctgtcagtctgtcaacctcactgtcctgcctctctggatccctgggagaggtgtgtgaagtttgttctcctgacaagagatgtccatcacacaggcaagggccagcagctgggagccctttcctgccttgttcatccttagagtgtgtttctgtgttctcggtggtttccacccattgttctgttgtcctgctggcaacccttgaaacaactgaggtacaacaggtggcctagtttacagaagggatgctgagcttagtcagcagtaagcccagatcggggtctgccctcttgcctcctggatctgacgttactataaccacccatagtcctgatgtagccaaggaccccatccccagtatatacacttatatgtaggtatgcacacaaaaggtccaggagcccagcctacaaccctgcacagtgctgtgtgtgtgcatcggtagtcatatgttctgacaagctgggagtcattgtgtgtccctacacaggggcccttggaagttcttagtttcgctgctcctcccctttagacatggtctctcatgcagtccaaactggtcttaaatgctcattggagaaaaaggatgaccttggtgtcctgttcctagccttccacttcctgagtctgggccaggcttgtgccaccccgactggtttatacagtgttcaaacccagcctagtgtgtgcaaggcaaacactctactcttggagctacatccccagccctccagcctctcctttgtgatcccattggaaatgactagatagtctaagttcccttcaggccttctgaactcctcttgctctgaactcaaggagtgcacagtccctggccataatggtggcaatacttagtttcctaaattctgcaatggcagtggtggtatagctagttccctcctttctttgggcctggctttgtttctctgctaggctgggtgaccccgagcctcttctgccctggctccatgttctgacggatgctgacacacctcacaaacacacccccacagctgggacaaactcctctcatcagactgtgaccccatgctgcacagcagcaagtcatgtggtctctgtattgtggatagttcgctttgaagcagaggagggaacactgtataagaaatcagaagtcccaggccccaacgctggggctgcctcttcagggagatgtgacttcaggacatctgggcttgtgtttgctcagctggaaaatggggatagtaactctagccttgcctgtcttacagggcgcctgtggaagtcagctgaggtcacgggcagggaagtgccctgcagacagcaaagtctggtccaattatgagggattacgattgctattattatctacccatagtaactgctctggctctggtggcaacaaacacacgcccagacctagattctgggactgatagagtgagcgtattcgcatactggcaggggccattataccaaaagatgacagcaatctggttagacaaaggctagagcctggctgggcctcctttcaaaccacctacacccacagcacatatgctggctcacctggcaccacaggctggctccaacagagccacctggtaaaggcaggtagagacactgacagttgccataatggtccagcaagcctgggatggggacattgtatagttgtatatgggggacatggacttgctctacagtccaagaatctccagagatgacatagacacctggcacaatagagccatctgctgagcctgaggggaggggtgaggctcctgcgggcccttctcattcagcagccccacctgcctggctagccttctacttgcaggctgcggataccatttattgcccatcctaggttttcaggcctttgtttttgccttacctctcctgctagctgcttccttgttcagtcccctctctgggaaagccctggctgtgctctcttggattatagtttgcagactaattgtcctcagctgtgactctcaaatcaaccatttcagcatcacctgtgaacgaatgagagctgcaaggtgcaagcccctgctggacctacagagttgagatctctggggttgggaccctgggagtctgtcactcagcccaggagggtggggtctccatcccgctcttacatgattccctagggtctgcagtggcatgaagtaggaggaatgccatggatgggagccaaaggcatcatcacgtcccaccagggagcccagggccaggcagatggggtgtggagttgggtgacagacagaagggctgtgcttgtctctgagaatacacagagagatttgtggaggtgagctctgcaccctgccacccatgagctggaaggggctgctgtttggggaggctacctctgtgaccagggcgatctctgtgacctccatgctgccctttcctctggcttcagaaactttgtggccgagatgcactgagcattgtctgttggctaagacactctatgaattattttaattcttataattgccccaaaaggcactgatattttcatgattctctcttattaaggactgaattgaagcttggagatgctaagtcactggcttgaagtcttccagtttgctgttcagggtccttcaaggcgaagagggtggaatgagcagtggcttccatatgtgctgctctgcggtgttgcatgggtttctcccgctgcgagttcaagggtgtttatttagaatgaatgttgggatccgtatagctcttcacatgtggatatcgaaggcacatccagagagagagagagagagagagagagagagagagagagagagagagagagatcttccttataaaagacactgctgtgtgcacccaactgttctctacccctcactttttgggtgtactgtttcttttcttcctccctccatccctgcatttcttcagacttccttacctttctgtgggcttcacacacacagctcagttccataagtctacagggtgaaagggatggtctggaggactactgaaaaacaggggtatagaccacagaatggtaaggccgtgccgtgtcactcaggcaggtggccccttctacctttcctgttgtggagtagaggagactgcagtggtgcggacttgcgctagagagctcaaagtgtgtgtgtgtgtgtgtgtgtgtgtgtgtttgtgttgcctgtctgtctgtgtgtttgtgtgtgcgcgcgtgtgtgctgggagtagaactcaggtcctctgaaagagcctatacacacttttaatcactgagccacctctcaaatagagaaaagctgattttcttcgttccacgtgataacagcatgtgcacatgtacttagtggagtaattaaatacttggcactaagcaggcttgtgatgtacatggcccgctagagctgaccagggcccaggattggcttatattgtctaaacttctctaagttagatgttatgaactggcaagtttagccatgctctcagcaaagcctcgggtagggtcagccaggccctggatacagacctgggtttgtgtcagggcttcctgcgtgactcagctatctgaggagccagcaccctgcccacctgcctgcctgagtgtggcgttttggtgagatggtgctcatgagtgattggttaacttagggacctgccacatagtaatttagcctaattagtctagctctggatcacttatttgtctacccacttgcctccctccctccctgcctccctgtccctctctgggctgtgagggaaaggagccatggtggggtgtgtggagtatggcctctagagaccagcatatgaaaagaagctttctccaggcccacaggcacaaaaagcctgaggcctgttacccttgggacagaagggaagccaaggcaagtgacagtgagacctactgcttgctgtggttagctccaggagtctgagcaggggccacagcccggcttacagtagcattggtctctcaagctttacatgctaaaggaaggattggagcccagccctgttaggaaagcagatcccctagggtaagtgtggggaagactggaatcagccatgtagtgggaatatggaaagctgagcttagcaagtgtctcttctggcctgggcccaggaggcctggttgtgcctggttgtgcttccttgtagagccatgggacagttaaggtgtcagccatcggcattgtacttcactgtagggtatggcaagttagacatcaggcatctcctttacactgcagttactgcaattgttcatagtaacccgggaagcacctgctacttttatccccattccacaggtggggaaccaaaggaggctaggtaacttggcaaagcagtttcatctagactagctgcttccgtaagccagaggacatccagagccacagtgagctgctgaaggagccgacatgaatatgcttatgtccatgggactggttgcaagcagaacagtgggtgttccacttgagagctcaagactgagttcatttgtatccagcacacagtaggtgctcagtggatattttccctgttgcctggcctgagagtgagggttgagatccagcctactatgcattcggtccagaagtaggtgaagcaagtagcttgtggtgacaggatggaggtcctggcaggcaaaactagttcttgctttgctttgttttgttttgtttgttttgtttttcaagacaggttttctctgtgtagccctggctgtcctggaactcactctgtagaccaggctggcctcaaactcagaaatccacctgcctctgcctcccaagtgctgggattaaaggtgtgcgccaccaccgcccagcagcaaaattatttcaaatcctttaacatttatgaagcacctgctctatgcaagttcctatgatctgtaggggatcccaaaagggacactaaggcatggctcctgtctccagagaagtggtggcctttggctaggagggataatttctttctatcagtaattatcctgtgaagccagtgactgtttgctgactactgtcagtttctgaaatgaagggctgatgagctttcaggggtgagtctggaggtgcctctagcagttcttgtcattcacaggacctcagcctctgtccgttgccatggagcaagaaccacctctaaggggtgaggcatgtctgcatgtgaacgtgtgtatgccttgtacaggtctgtggtgccctgctagggcttctcaagcaaggtgctcaggcagcccagggcagggctttgcctcctgcagaagacaattccgtggccacagacagttcctgggaggtcagccagctggcaaaggctgcatgcttattgtcctgggaggcctgggcaagtagctggctagatctggcaagttcatccccttgactcaaacaccaacttgaggcatctgttcagattctgggtcagtggcttctgctctcagcactaacgggagcatggatgtctctctgtttctggggaagggcttcttttgggggacaagagcctatgcctaggcccagagaggcaagtgtgtgtgggtgtgtttgcatgtcagtgaataaggtgtgcattcagtatgcactactgtgttttcactgtgtgtgcatagaacatggcataggcagatatagaggcttaaaagacccgcaggctggaaatgagaagctgggactgttgattcttaaggcttcgcctttgccttctgcaaatctcagaatcgctctgagcttcactttaccacctgtgtgatgggagaacatgacacctactgtggtttctgtcaatcataaacataaaatgaagagcaggcttgtaaccccagcactcgggagatagaggagagaggatcagaagtccaagcctgtctcagctgcctgtcgggttccaggctggctcaggcacttgggagcctgtttcaaaacccaacaacaaaaaagcatatgtggaaatcctttgctgattttgctgtattgtacaaatgtgagcaattattggcatagcccagcttgtcagaaggcaaagatgtgtgtgacttaaaataatccatccagtgagctgtgctaaaatgtaggtcaaatcatagcctcagaattttagagtgaggctggtgggaaccacttaacctaacagcccaccctagctgaaggttccccaaagctgtaaagacttccagaaaaggaaagtgacaattccatttaaggtgtagatgatctgtttaaggttgggggttgagcagatccctgacacttgagacgtgcagcctggaggaccacaaactcatggacactctgagttatacagtgagagcctccctcaacacacaatgcaaaacaaaacaggtgtgctggctcatgcctattagcgcactgaggagggagactattgtactttgaggccagcttaggctacataataagttttagaccaggctgggctcaacctgtttgtgactgtggagacatagagatctatgtgcctttgtgccctgtgcgctgtaggtttgtatgtgagtctcttttgtgcatgtggactctattcttttttgtttgtttgtttgtttcgagacagggtttctctgtgtagccctggctgtcctggaactcactctgtagaccaggctgacctcaaactcagaaatccgcctgcctctgcctcccgagtgctgggattaaaggcatgcgccaccacgcctggcgtggactctactctttactgagtatctgctatgtgactgtcactcatctaagggttgcccagtatctgtcaggctaggcttttttttccttttcttttctcttcttttcttttcttctcttctcttttcttttcttttcttttcttttcttttcttttctgttgttggtttttagaacagaaactcaagtactctaggctggcctagaaattctgaccctcctgccttcacctctcgagaagtccctgctggccaagcacattagtgcaccggcactgggaggcaggaggattgcaagtctgaggtcagcctcaaattcatggggagactctgcctccaaaatgaaaaacagcagctctggttactcgattcaaagagctcatagcattgcaggggtgggtggctgtcaggacctatccgttcagtctaggtagggaaagcaagcccgggaagccttcagggaaggtgggttaggcaggaggagtagctgtgcctggggaagcagctgcttttgcacccgctgcctatgttggggccctgggatagaaaggaaacacaggcagttcagcaagagcccagggacctttacaaagactaggagttgggcttgatcctccaggtccctggggtccccctcagagagggttaaagctctgtagaatgacatagtccaccttgcaatttggaaaagtctgccgccccagcatccacatagctcaccatagcaacggcggtagccagatgttgggatctgtctgcttgtgagtgatggctgcacatggaggagagagagctgggatttgctggaggccaggagggggcctctgctggcgggctgggaatgctggcccctgtgaaacattctagtatggaggcaggaggaagtaagccgttccccagtgactgtcactgttcccagcttcctctatcgccttacttagttctcaagctccagctgtggagcaagcatgatttccatcttatggataaggaatgcaggctgcagagaggctaagttcaaggtgactagtaaacagtgtaagttcctgctcagcccagccctgctctttgcaaaacccgtctataatttctgcccccccccactcctgctacagttcttgaggggctaattgagactcctccctctccnnnnnnnnnnnnnnnnnnnnctcccccctctccccccctcatctccccttcccttttgtctccccctcccctcggatgaggaggccaatctgggctcaaatctgttcccactaaatgtgctgctgtttccagctgctccggttactacagcacaggttcttgcatttcagtattagctgacattcgacgacatcggtgctgcttgcagatttgagaagcatagcccacattcctttgcttaacccgtcttaggcactgacaggcccctgacagatgcaagaataaacctcttgatagaccttcctggagtcactgagggcatggcccagaccatctgtccacccaatcagtgtatcagttccctgcccagtggtacgaacagcccacaggcaggctcagagcagaaagcataccctccattttagaatgctatattgataacttgctttccacaaagctgtactgagcttcatgggaaggtgggagccaaacctagatatgggtccagcagagtaggaggtctgttctgtgcacatcgtgcttcctgctgggattggggcccaggcctggtgctcttcaagtgctggtaaggtggctgcttcctcctaggctggactagtttggattgaagccagcagggacaaagtgtgctgactgtgtgtagcatgcctggatagcttgtatgaggtaaagcacgtgagcagcacatggagggaccatgtgacatagggttttcacacggagggaccacgtggcatacggtttgctgttaaagaccctagaggcctttcccatggggtcatgagaacaggtgtttgtctgtaccagaaggtcaagtgtctttggtttggtttgatttctgattttgcttgtttttgtagtagccaaagatggttttgaactctccaaaaggcaaggataaccttaaatgtataaccttccacatctgcctctccagttcaggcattgcaggcatagattgccatacctggcgtatgcagctggggacccaggcctcagttccaagcacactaggcaagcagtctaccaatctagccaaaatggctttggttttttgtcattgctgtatggtggccatgttttctttttcctgatgaaagactttcactcttttttcagacagaatctagaaagtcaaacagatccctaaaactgtgataaatgtagtttgctagagaaataatagttgaaatcccagagtttctgggtagttgtgctctagcatccgtcctaggggctgaggtagaaacagtgaatggagcagaccacaggcctggtacttgttcactttgaaaagcaaaggcaggcagacggctgggttcttcccccgcctgtgaataggaagcgaggctcagaggatcccacgacgagggccaggggctggagacctgctctagtcatgtctgtgagctcacactttcctgatgttttctataaagacagtcacagctgtggtagaacaaaccaaaagcaatgtctcactcccagagatgccaaggtaacccgcgcgctctgagctgcgtgtgtcagatttgatctgtgcgtccccactagtttcttgaagaggcatccttagatcctcgggacacaactcaacagaacaactggacagaacaacagctggcttcttatggacatgtgtccttgggctacctgaggcagggccccttccgtggcccatctgtctccctggagccttctagcctcacctctttgtcagcctctcctaaaaggaacacccggaggtcagtggtcctggaggcagcctctccctccacactggagcctctgcgtcctggagactttgtgtctgggctccttacctggttctccagcctttgtcctcaggccattgtatcttgcccagtggcggccctcaaagccagctctgaccccattgtatcaggtctcttgcctactagcccttcctttctcctacagtgcactggagacctctcctgtgcctctgtctattctgtctcctttgtaagctggacagtccccaccagtaggtgccgaggtgtgcctgtctgtcacctccactcacagctcttcagaggcctgttagaacttgagatgtgattgtctgcttcctagacataccatgagtggatggatggatggacagacagacaataggtcattattgctcttgctgtgtgtcagaagcctgtgattggtcacagtaggtcttcagtacatgcccttccaatacctgaaaatcgatgtggtgagccacaaactattttgaaatcacagaaaatgaaagttgagtgggatgtggaggaccatggcaaatctccaggaagcatggacgcccttgccttctctgtccatggtaccagtgtctctttggcctggctttctgcagtgagatctgcaaagccattttcagatgctaatgtcatgtgaggctcgtggagcagtcttcttggtcaagggctctctccccttccccaacattgtttctgccagtggttagtcatgttggagcctgctgagtcaaaagggacttgtgggtggtttgtggccaggctggagcagtgaggcaggactttctaggtatgcagctctgccccagaagatgtgcctggaggtctcagccctgagcaggttttgttgagtaggagcaaagcagaggttccatagtctccaagacacttctgtggtgtggtgatgtcaatgtcagggccacatggaccaggctccaggcaggagtgtttgcagcctgaaggaaatgcctgtgttctgcacagtgttgcatgcattttaaactatgtcactaaagtgatcatttgatgatattttgttttcaataaagattcattaaataccttgctgcttgaatgtctgtaatcatgtaagttttttttttccaatcatagaaataaaatcaactgtggtctgggaatatgactcagtggtagagcccttatgtagcaaatatgaatccctggtttccgtacctagcatccaaaccaaacagactcagagcctcgtattaggatcttttgttccttcattatttttttttttttgctttttgttttcaaaacaggctttctctgcatttctggctgttctggaactctctctctctccctctctctctccctccctctctctccctccctctctctccctctctctccctctctctctccctctctctccctctctctccttctctctccctctctctgtctctctctgtctctctctgtctttctctgtctctctctccctctctccctctctctctctctctctctctctctctctctctctctctctctctctctaccaggctggcctggaactcagacatctgcctgcatctgcctcctgcctagccgtgttatgatcttataattaggaaaaagtgggggttggagagatggctcagtgggtaaagtgtttgctgcttaagcatggtgaaccaaggccaggtccccaacacccacatgaaaactggggaggcggtgctagggagacagacaggaagaccctgtctcaaaaaacaagggttcgggttgttgatatagttcagtggatgaagtcactgggtacaaagcctgaccacctgagttcaagtcccaagacccctcgatgagagaataaatacctgagagtcctctgactgtctgtcacatgtccacttgtgctgcatgtgtgtacatgcccatacacacaaataatctatgtaataatttttaaggacattatttttggggctggtaagatggctcagcggttaagagcactaactgctcttccccaggtcatgagttcaaatcccagcaaccacatggtggctcacaaccatccttaatgaggaacaaaaaaaaaaaacaaaaaaaaacaaaaaaccaaaaaaccaacaaccaaaaaaacaaaaacaaaaaaacccctatgggccagaatgatcggggccagagtgaaagggaagggggaaaagacattttttttaatttgtttatttgtgtttttgagtcagagtttctctgtgtagccctggctgtcctgacacttgctttgtaggccagaatggcttcaaattcagagatccacctgcttgtgcctcttgagcattgagactaaaggcatgtgccaccaacatacctggcttaaagaaattctattttgtaaaggtggagagcagttgtggataacacctgattggcttcatctccacatgcacacaatacatgtatacatacatgcacacacctgagagagatcggcttcatctccacatgcacacatacatgcacacatgcatgttctctttgtgtgcttaaagccaagtatggcggcacttgagcactcagaggtggagacagtagctcaaggttggctacagagggagtttgaacctagtcagagttaggtgagatcctgccttagaagctgtggtgaaggcagaggcagatggatttaggtcagcagcctggtctacagagtcagttacagaacagtcagggctacacagagaaaccctgtctcaaaaacaaacaaacaaaccaaccaaccctaataataataataataataaattttaaaaaagaagttgtgaatggaacatataattttttacacacacacacacacacacacacacacacacacacacacacacacacacacaccaggcctggtagctcatgccttttgttttgttttgttttggaatgatttatttatttattttatgtatatgagtacatcgttgctctcttcagaaacaccagaagagggcatcagacccccattgcaaatggttgtgagccaccatgtggttgctgggaattgaactcgggacctctgggaaagcagtcaatgctcttaaccactgagccatctctccaacccggaacatatatttttaattctggaactcaggagacagactcagatggtttcttgtgaggcctagtctacatagcaagttcaagggctactagagttatatagtgagatgctatctttaaaaaaaaaaaaaatcaaagcacacagtacactcattagagggagtaatacccactggaggtccctctaggatttagctgcctattttatttggccaacgcttggaattgaacctagagtgttgtgcgcgctaggcaaatactctgtcaccgaagctgtactccggccctctggatttactgggatggggttcaactttaccacacaggagggttggggacagcatgacacagccctggaaatgtgactgttgtgggggtagcacaggaggaggctcatgccaatccaggtagtctggaacacagtccctctcgggtcagctctggcttacagggtgtgtctgtgtccacaggaaggagaggaacaggaggagaaccgtggcaaggaagagcgccaggagcccagcgccacggcccggaaggtggggaggcctggccggaagcgcaagcacccaccggtgagtgtcctctctcacatgaccgtgcctgtgctgtggacggcagcgatgtctatccgaaaggccttggggacatgaaggccagatgtagggctttgttacatcctccatctttgaacctacttttcctttccacatttcctccagttttagactagaggccaggaacttgtctgtggatgtgggagctgagatttcaaccaagctctgacccctggcttcccactggaagggtacccagaaagcctgccacattccccatctggactgagagcctgagtctggacgtgtgggccctgccaccaagctgtacactagccatagtcctctgttcccaggaggacctgaggctagacagagcctgattccagaaaaagggaaccatgcagcctgagcttcggcaagaggccccaggcattgctgaaggcctgcagggtgactggcagtggtgccgctggccccatgctgaggtctgggggagctagctacagggctgctcaagatggagagagctggggggtatggtggagctgtgggctggaagagcctgcctccctcaggcataagggtggataattatttcctagcaaagccagctggttcctttctcttagccctaccagcagagaacgtaaacttggagcaggaagagcaggagggtgaaggggagccgcagccccagattggtaacagtccttctttggggcaggtcagcaggtcagcagggagtagcgattttcacacatctagttagggagatggctccagagaggtcagaggctctgggaaccttcggggagcagatggggaccacagccagttctgcatgacacaagagggaaagggcggaagttaggtaactagctggtaagtaatttaggacatcttaataataaagcacacatggatattttatggcctgtaatgaaaaatccacctgacaatggaagaataaaatgatggttcaggagaattcccagtttgaggcagctgctcagcagattccccatgcttctgtctttcaccctggagcaccttgaggggtgaaggtgtgtgaaggagcagctggctccatttgactgtgggcatgtccttgccccctgagccacctcggccatctgcagagcaaatttctgcactccagtcactgagaacccagagccaccacatgtaacaaataaagagccagtgaccctttgactccaatttgtcagtctggaatcaaaaggcaggagcagcaccgagagagggtgagtgtgtggggtcagagggtatgaggaaataattcgccgagggaggactgggcgggagtcattcagcctgagtccagttttggtgcagaaagaaaaatactgtctttggagaccagcagacccggttccaatatccacttcacaacctttctgagcttgaacaagttacagccagaccgcaggcagggtgttttccttctagggtgcctgagatgaattcagtccgctgcagagcaagggctagactcatccctgcctggcaccgtggcaatcacagtttgacaggagaaaggatgtcatggttggcgcttctgagctgtgtgacctccctgataaaatgggctgtcaggaatacctgtcctgtgtacctcctggggtgcttgcaaacagcacagtggagcccagatgggcagcgtgtgccagataataaacttgcataatttcagtgtccacagaccaggctgtgggcttttggggtagggccagcactgacctctcagtgcacattattcaaagcatcaagtggatgtggtccagctctgggtgacactgcagccacctgtactctgaggagaggccccttgaaaagctggtgccactgaggagtctgggacataagataaaggagacttggttggtagagtgctcacctcgcatgcatgaaacactgggttggatctcagttctgtataatattgggcatcgcatggtggcacttgggtgtggtggcaggattagaagttcaaaatcagaaggtggtagtggtgcacgcctttagtctcagcacttaggaggcagaggcaggcagatctctgtgaatttgaggccagcctgtgagttgcaggacacccacagagaaaccctgtctcgaaaaatgaaaaaaaaaaaacaaaaacaaaaacaaataaaacaaaataataataataaaaattcaaggtaagttgggcgtggtggagcacgcctttaatcccagcactcgggaggcagaggcaggtggatttctgagtttgaggccagcctggtctacaaagtgagttccaggacagccagggctacacagagaaaccctgtctcaaaaaaacaaaaacaaaaacaagttcaaggtattctctgttaaatagtgagtttgaggccagccttggctatgtgagacccagtctaaagagttaaatttaaaaaaaaaattttaaagatttatttattttatgtatgagtacacactttagttgtacagatggttgtgagccttcatgtgattgttgggaattgaacttaggacctctgcttgctctagccaacccaacttgctccggccaaagatttatttattagtataagttcactgtagttgtcttcaaacacaccagaagagggtatcagatctcattatgggtggttgtgagccaccatgtggttgctgggatttgaactcagtacctttggaagagcagtcttacccactgaaccatctcaccagcccctaaaatttttttttgtaatggactggagagttgacttagctggtgcacctgttactcctgcagaggacctccggtttgacttccagcatccattggtggctcacaatcatatgtaactccaggttcaggggaccagatactctttctgacctccaagaggaccaggcaagaatggaactttatgtgttggagggaacagaaagtcagcttatagactgcggcttttactggcaggccacctggcgatgtttcctgttactgcaggctactgatggcctcagtctgggttcctagctctggtggggcaggtgcggcccaggttttctcctccctcctggtgtccttttctcctttgcagcagcgctcagcaggcttctgtgggtctgctgcagccctggaattagattccctaggagctctggagcagccctgtgtgtcccaggcaggtctgaggaagggcagtgagctaacgaaggggaagccgagaaagaggccaagtgtggccaaggaggagaacttcgatcatgcgagctctactctgcagcactggacagaggagttcaactacacatctgggcctccccagcccccaaattaaacacctttggcgccttctcaatttgtccccaagcctgtgcaacagattcttagacatctgtccttgggtgctgctgtgttagtttcctagctagaggagctcacttcccagaacccactgttgcttcttgcccttcacatggaaacttgccttccaatctagagtcctggagaggcgtagtcacaatagtaagctgcttagcaggtctgttcttgagagtctgccatctctctctctgtgtctcactgtgtgtgtgtgcgcgtgcgcgtgtgcgtgtgcgtgtgcgtgtgtgtgtgtgtgtgtgtgtgtgtgtgtgtgtgagagagagagagagagagagagagagagagagagagagagacagagagacagagagacggagacagactatgcagccttggctgtccaggaactcactatatattaaccaggctggccttctggagtactgggattacaggtgtgtggtgtgtgccactgagcccagcagacttccatttctttctttttccttctattttatttatttttatctgtatgggtgtttttcctgcaagtgtgtctgtgtgtcatgtatatgcttagtgcccacagaggccaagggagcagaggaggtgttggatcccttagagctgtagttaacaaacggttttgagctgccatgtaggttcttggaatctgagtcccaggtcctctagaaaagtagcaaccttaatggttaagccatctttccagctctaggactccctcccttctccccttcctctgtggctccttcccttcttccttccctcccttcctcccttcctttctttctgttttagtttttcaagacagggtttctttgtgtaatagccctgctgtcttggaacttgctttgtagaccaggatggccttgaactcacagagatccatctgcctcagcctctaagagcatgtgccaccccacctggctcatggactccatttatcttaagactggagagatggctcagtggttaagagcactggctgttcttccagaggtcctaagttcaattcccagcaaccacatggtgactcacaaccatctgtaatgggatctgatgccctcttctggtgtgcatgaagacagagtactcatacacataaaataaatcatctcttaaaaaaaaaaaaaaaaaaaaaaagacaagatccagaacactggccctgactttctggctccttcttgtccccttttcctgccccctccacactgtgcccaacacttaacctgtcttggacagaagaaccttgtattcgtgctgccccacagggtgctccaggcacattctccctacttgtgtggtctgatagccctccttgcctcttcccttggagccaaaccccatcaagcctcgcttgaaagtgaagcccaggcctggggtgggggtgggggggtagttcagcaagcaaaggtacttgcttgaccaaaatggtctgcacgcctcaccaccagagccatgggtgctgcttgtccgcagagaactctgagtcagtgtctaggagcttgaggtttctaaactgcaatctcatttatttacttatttacatacttactcaccgagtggtactcaaacctagcttacacatcttcagctgagtgctcagcccctgagccccacctccagccctggacaccctctcccctcccataactcctcccaccccttcttttaataatgaatattagtattcatgtttgttggttttttttttaaacaatgatacactttcttagcaaatagagaagttagaatccagccccatcgcagctcccagtgctctcctaaatcagatttgcttttactctggataagtagagcttgttcctccactggctgattggtttttgagatagacactttgtagcctgggctgtccttgaacttgccacaatccatactggctcctttgcatgtctggcaaatagaacatatttcattacctacaatcgagcaatgagaataaaaaggctaatagcacagcactttgttgcctgaaaaggccggttcaaagacttacttcaggctagcaagatgactttgtaggtaaaagcctgaagaatctctgtgggatggagactggctctcaggaattgtcctccgacctttggaagagtgccaatggcatgaatgtgtggtgtgtgtgtgtgtgtgtgnnnnnnnnnnnnnnnnnnnnnnnnnnnnnnnnnnnnnnnnnnnnnnnnnnnnnnnnnnnnnnnnnnnnnnnnnactcattcaagacaattacgaatctgaccagagttccaatatttgtcccttgactcttgcacatttggagtaatattgacacacacacaaatgcacaagctctcacataccccaataataatgaaaagactcacttcttggaccccctactgtgagccccctgcttctcttctccctgggagcctgggtccccaaagcctttttaagttagtatatgaatgcagggctgtttgaaagcaagcatactgtctcaaaacacctcagagaaagctgaggtcttggtgtgtggcgcattggtagcattctatatacatgacaccagcaccacataaacatgcctgtaatgccaagacttgagatatggaggatcagaaattcaaggtcatcctgagccagcatcaagttcaaggctagccttggccacgtgagaccctgtctcaaaaataaaaaaataaaagaaagaaagaaaatgtaactgagggagaatatgacacaaatcctgggactccaggtatagctggggaggctggggtggtacagagcctgggaggtgaagctgcttcagagtaggcctgggcctgccgtgttggcagcattgccttggggaaagctaagatactgcaaagcaacaggaaacaggaagccagctgctgggctaggagggccttaggaagggagctggcacctgggccagggcctgtgggctggggaggaggagactggcatgtaaaatcaggcctgtgtgtgcggctcagtggaaagaaagggctggtgccctgctcaccagctcctgaagaccctgcactgtgacaagtggaactgtggtcacaagcccagacagctctgcagaggtctctgttctttgtgggtagttctagctggagcagcagagggacagtttctgccttggcccaccagaccctgtggttggttggtgggggtgacaggccctgcaaggtctacaccctgtttgctagcggcatgcatatcagtggggatttatacccaccaacttcctccagggttatttttgcttggagggtgcattctgaggtcactcttgctaagaataacccagcaagggcgggaggaggagtgggtgggagctggcgccaagctcagctgaggcaggctgggctacttactccacagcagcctcctgcacagcctggaggcagtgggttacagagggcagtgctatagggcagaaggacagaagccaggggaagccaggcagcgctgggctgagcctccactgcctgggcagttttccggctcccagggctttgcagtgtggcttattttccagtctaagagccatttggttcttctccaacagaactgaatcctctcctcgtttcaagaccagtcctgcactttgctagctctttaagcagaggcttgatggccgctctcccttggttttaggctctcttagtcctgggctgctgctcctggtcacaccccagcagtggccttccagaagacagctgggatggtgcatggggagtttaactcttcctaaggtttgccctccagagcatgcaagaaaattctgagggaggccagtggtggcggtagtggggtgggggtggggggtgccagcaggtgtggaccttgagggtcaaagaaaccagggaaaatatactgggaaatgtggggcttccctggcccttaaaggagggcaggaaccaaggggaagtggcaggtcctgctgaggcaatgctgagcaaggtggggcaggcagttccgttaaaaatgagtcttatctggaaagatagtatgcaagagacctgagggggtttactgtttattttatttattttattttattttatttgtttttggaacagggtatcctgaaactcacaatgtagaccaggctagcctcaaactcccagagatctgccttctctgccttctgagtatagagattaaaggtgtgtgtgccactgtacccagcttcttgacaggcatacacagtcacaccttgtattctaactctgtatcctttaaggcctgggaataaagggagcattgagcagaggcaaatcctggcctggtgaaggtatagaaaaacagagtgtccttcgctggtcagatgatggagtaaaaggagaagcccaggccccggcagtggctcaagagggacactgtcagggacactgttgtcagagagcttctgagacagagctgctagagatcactgtagatggcactgtagatggctgctcccggcattgggggtggagctcaggggcagagcacttgccaggcatgctggactccccatcaacatgggaggaggttgggggaagcatagctggtgttactgggggattattccaatgaatttaaaagagtaacaaaaaccaccttgatttctgccccatcttgactccttgccagaggcacacagtctagggccacttgtaacaatgatttcaggtgtgttggtcccagctgctgtgtcctccttggggtccagccacaccagcctctcttctagcgtacagcgctgtccagtatgtgttacctaggagatggcctgcttccctgttgttaccctcacctagacactgtgtacctgagatgcttcacactggctgccaacctgacaggactgagactcgtctaagagaataacctctgggtgtgtctatgagagatgctagtgtgggttcactggagttggaagaaccaaccaggatgagggaagcaccattgcttgtgtcgagatcctgaactggataaaaacggagagagcaagctggctgccgacatccatctctacttcctggctgtggtgcaatgtggctagctgccttcagctcccgctgatgtgatggacggcgtcctgggatgaaccttgccttccttaggttgcttttgtcaggtgtttcgttgttgttgttgtttgttttgttttgttttgttttcattaagaatattaacagatgcaacacacacggcagctctttgcacctcaggaaagacattatctgagaagccaggaaaggatagggaatgaccaagtggaggggacagtgctaagctgggacaggtttaacagagagtggcaaagactctggagtggcactactagggtaggatgagcatagtactttaacccccttggctttgctttgagaggcatggcctcaccaagggcaggatgggccagagttacactgcagcaaagttagctgaagcatggcgtgggtggcagggacttcgaactggttagcgtctagccaggccctgcaggaggatccttgattggcacctagttcccccttgaactggggggtggggggtggggggtgggctacccttcttttcacggtaaagcttacttgcctgtgagggaaactcagcctgggaggtccttcagatggctgtcctgtacttgggtctccctgggagctttgctgaagagtatgagggatgtgtgtgagcagaggccagccttggagccatcttcctcagatggattccacatattgctcgggagccttgagacaattaagttttttgattctatcaaggaatggatgccatgtcctttgctgggtgctaggatcctggagtagagaaaggaaagacagagcccacagtccagaagggaggtacactgtaaagaagccattaccccagcatggtgaatgctggaatggtgaataggagctctgtaaacagtgtggcctgtgggtgggggtggggaatgccacaggggacacagttctctggatgaggctgggcccagcagctgtccacatctgtcatctatatggcgagggctgtgggagtgaagcataggccaggggttaccatggggtgaagaacttctatgtggggtgatggtcaaagaatatgaatgtagtcgatgtatatttcaaaatggttaaaaagacaaattttatatatactttatcatgaatttggggcggggcggctattcttatttatttgtttgtttgtttgtttgtttgtttgttttggttttttcgagacagggtttctctgtgtagccctggctgtcctggaactcactttgtagaccaggctggcctcgaactcagaaatccacctacttctgcctcccgagtgctgggattaaaggtgtacgccaccacgcccggcttatttttattttttgagacaaggtctccctacatagcccagacctggccttgaacttgtagcaaacctcttatgtcagtctcacaagtgctggctttgcaggtctggctcaccacagccagctatcgcagaagttttttttttttgttgttgttgttaggtttgtttttgtgttgttttgtttctttttaatgtattccttaatgctagccatggtagatgttagagcatgtaacagcatccttgacctgtatccactagttgccagcacatgacacgtgacaccaaaacaatcttctgccacattgccaaatgtcctgaggggagcagtggtgtttccctggcaggaaccacccatgaactctgctcaaaatgtgtttcatgaagcagaggctgaggagggtgctggactgcagggaagcaggggagaggtgtctagagacaggaacaggatcgtttctggcaggggacaaaggtcagcaaactctgagaactcctgggggtgtgagccacagtggactctactgatcctggggtgaggttggacccagccgctctccacatctgccatctgtgtgatgagggctttcagagctgagcataggctgatggcagggctgacagacccaaagtgatgcatgttggtgggggaagcagacaatggcaaagggaccagatttgactgattctgcgtcattagtgagcatccctctgcctagttctgcagaggagaaggccctcactgctgctcttccctctcccatgcttctcctgcagctgtgcacagtgcctcccaagttggtcagcagtgacacgtggaatgtctgtctcaggcccgtgctgttgtcttcagagacactgtcaaagtaaagcaaacagaaacagttggtgtgacactctgacaaggccgtagggccagagctccctctgggctcgtgagctaggtgtttgaactttgaacctagtctttgtcattaatggagccattgggaatatttatggagtgatgttgtggtcctgctctgtgatacatccaactggcttaaacccagtccctgtgttccaggagtccaggagctgatagggacaggggaagggagggaactcaagacagactcgaaggtctagctgttcaaaatgccgcccccccccttttaaaagggttatctattttatgtataggagtacactgtagctgtcttcagacacaccagaagagggcatcagatcccattacagatggttgtgagccaccatgtggttgctgggaattgagcacaagacctctggaagaacagttagtgctcttaactgctgagccatctctccagcccctaaaatgccccttttggtaagcccccagctcctccccagaaactggaaggctactttggtccattgactgcagtctggcttcctctctctgggtagttcctgtaggtggatttactctgcccagttgcccaggtcccaagagccctagggagagaggccatgcttagtccagggtctagagggcaaggggtcagctatggtgtaggagtcatgagttcacttgaacctcaggtcagtgatgactcaaaggaaatggagtggtccactgtgtagagtgcttgcccagcacaaatgaagcccagggttccaccccagcattgtataaaccgagtgtggtagagcacacttgtaattccagcactcaagaagccaagtggtggggaggtaaggatcaggaatttaagagtagccttggctgcatgaggctatcctgggctgcacgaggctagcttggattaggtgagtctcaatctcaaaaaacaaaacaaagtaggaaccaaagtcaagcaggagaggataggggccattaggaagagggcctgatggtggtggggctggaatctagctcactgtagcagttacataatacacagaagaaaggctctgggtttgattcccagcaccaaaatggggaggggtgagggatggggtgggccaatgggaaggggtgggcctttcagccatcgagctgatcctaggcttacagctcagctgtgtgctagattcccatctcttcatccacctgtgtactggctcccacctctgggtgtgtctgatgctactgcagaggggttccttctggcagggctggtggcgaagcacctacgcagtgtgcttgaaagactgaggccaggcagagagatagcactcccggctcccaaggctacggagttggtaccaacaggaagtgagtccttgggtacggaggctgtatgatcctcatgtaagaaggaagcctctaggatgatctcgggccgctctgcaggggaagcctacagtgaagagagagagagcatctaagagagattgcttctgtccaagtgcaacctgcccacctccctgcagtacaggttggctttgcagtatctggtaccactggtccctggaaagtgtccaccagggcaacgaggcatggccttctctcatgcgtgactcaccttaaccttgcagagtgacagagtgacagactgacagaggaagtttccatgctgaggtgggtcagacacatggtgtgggagctggggaataaaggaagtaggtggtcatctgtttgctcctctcttctgatgcagctgcccagcagcctggcttgcctgtggaggctttctctctcccacctggcacttcctccttgtgctgcagcctccggaacccccagctgctggggcagacagcaatgcatctcctcagcatgttctctttcccaggtgaagagcccgaagcatagactggtggatcaacagtccaactgctggtccctcaggaggtggcagtcagactctgggtttgccacttctcaggggtcctctccagagagcagtgagctcacacttccatcccagacatgaaatggaggctgtgaggggaggggccagcagctcaaacctctcaggccatgtgctgatgctgcagcctttctgaggcgagcttggcatttctctctatacttggacccctgggactgccctacagatagacttagctatagggaactggaggtcataggactctacagcagctcagccccagaacccacagtgggtgtgagtcatagagcatccactgagtaggagggagagccatatgcacgaatgtggagagacgccattgcatttgtcaggggagaagcgagttctagaaccttctgggtagcataataaaacatgatcttgaatctcgtgtgtgtgaatgtgtggatgaactcgtagcttacatgtgattgtgaaaagtctaaaaaggaaacctagccctttggcacatgcctgccatcccagcccttgccacacagagcaggaggatcaagagtcaaggccaacctcagatacacagtttgattgaaaccagcctagattacatgaagccttgttttattttgtttattttttaattatgtatatgaatgttttgccagcatgtatatatatcaccatgtgcatgcctggtggatgtcagaagagagcactggaccccttggaactggagttctagttgtaagccaccatggggttgctaggaattgaacctaggtcctctctgagagccattaaccaggagccatttctttagcctgagatggaacgaaacatctaaaaaagatggagtatggcccccacacctttaactctagcactcaggaggcaaaggcaaacggatctccttgagttccaggtgagccagagccacatgctgggaccctattggggatgagggtgggggctgaaaaggatgttatcaagctactaatgattttcagggagaaaataacttggggggagaccaatagacagacagacactttcatagagacgatcagaggataacttgcaactggttctctccttccaatatgtgggtcctggttatcagactcaggtcctcagcttggaagcaagtacccttacctgctgagccattgtgccagcttagctttggtttgcacaattcaaattttatggggctggggacttggcttagtggccctgatataattccccaccccacataaactgggtgtgttggtacatgccagtaatcccagcatgcaggtggcagaggcagagtttaaggtgatccttagctacatagtaagtttgagggtaacctgggctaactgtgactctgtcacacaaaaataaattacatatgtctgattattttaaaagacttatgtatgtatatgagcactgtatttgcatgtgtgtgtgcataacaagagtacatcagaaacagaagagggcatcaaattccactatagatggttgtgagctgccatgtatttgctaggaattgaactggggacctctggaggaacagccagtgctcttaaccactgagccatctctccagccctgtatgtctggtttttttattattattactaattaagatttatatatttttgttggtagattcttagtgtgttgtcctgactgacctagcactcaaagagattgatttgcctgcctctgcctctgcaccaccacacctggcccattacttttgtttgtttgtttgtttgtttgtttgtttgtttttcgagacagggtttctctgtgtagccctggctgtcctggaactcactctgtagaccaggctggccttgaactcagggatccacctgcttctgcctctcaagtgctggggttaaaggtgtgcgccaccaccgcccagcagccctttacttttataacagaaaaaaagagtctgggcaaggtggtaacatgccagttgtctgaggataccgctcaggaagcaaaaacagaggttcagggtcatctatatctacataatgagttcaaggccaggaccctgtgaaacaacaacaaaagactcagggaaagtatcagttgattaagcatagtccttacctttcacaaagtgagcctttttgtttgatttggtttttgagacagggtcatatgtagctaggttggcctcaaagtcactgtgtagcttagaggaatccttttctctctacctttgaaatctggaattcctggcacgtggcaccatgcctggctcaggtctcacctgggctcactgagccagctctgccccttcctacccccgaacattttgtagctgtaagattactgagcacaccctagagcctgtgaagctagcagaccctgaaccaatcaatcacctccagtcttctgaggtgttctgaccacttgcctccagatgnnnnnnnnnnnnnnnnnnnnaagccaagagacactgaaagggaactggggctccaggacaatgtgaggacagccagttatttagtttgattagtttctaccagtaggagccctagcaggttctgacctcaggcaccaggggatgaagcggcctgttgtttttccaggcaggcctgtgtgcttgggcccttggttagccttggtctgaaaacctatgggggcctgagctgggggacagaacgctatgaggctaggtccagaggatgatgatgatggtgatgatggtgatgatgatgatgatggtgatgatgatggtggtggtggtgatgatgatggtgatgatgatggtgatggtgatgatgatgatgatggtggtggtgatgatgatgatgatgatgatgactgatttacttatgtatgtgagcacgctgccactgtcttcacacacaccagaagtgagcaccagatcccattacagatggtcgtgagccaccacgtggttgctgggagttgaactcaggatctccagaagaacaatcagcgctcttaactgctgagccatctctccagcccctggagaaatgcttcttgtgaaggcccacactggcaccattctcacccaggggagcatggaaggaaggctgcaagagctgaagcaggccagcctcgggcagctggaattggatgggtggcatttgaatttcctgaggaagggtccagtttcaatgatggagcatgaggaactgttttgttgtgttttgttttagtttcttgttacgtttgtatttattatgttcgtctgtgtctgggaacatacactagtgttttcagggtcaaaggacagttttacagagtgggttctctttggtgtgagaattgaactcaggtaactcagcttgcagagcaagtaccttttccaatagaaccatcttgccagccctgcttttagctttgtaaggcagggtttcatgtagccctggctgccttcagactcaatgtgtggctccggatgaccttgagcttctggtcctcgtgcttctacccggtgggtgctagggtcactagggtcacaggtgtgcaccgctgtgcctggctcacacagtcctgggacggaacccagggcttcatgtttgctagacaagcactctaccagctgggctgcatgcacagctgcagggaagtctgtgtcctagtgagatagaatgcagtagggtatcctggggtcacggtgggatcaggctggcccatcacttgaacccttaaaccttcgaaggtcgtgtccttatgtttgtccttcttcatctttccaggtggaaagcagtgacacccccaaggacccagcagtgaccaccaagtctcagcccatggcccaggactctggcccctcagatctgctacccaatggagacttggagaagcggagtgaaccccaacctgaggaggggagcccagctgcagggcagaagggtggggccccagctgaaggagagggaactgagaccccaccagaagcctccagagctgtggagaatggctgctgtgtgaccaaggaaggccgtggagcctctgcaggagagggtgagtcccagcctcagggaaccctctttggctcctctgagtctatggcagatttcaggatgatgggcaaaagtgggccgggcagtggtgacggtctagaagctagacacagcacatgcatgtgtttacttggctcacctaatgtggttaacaggttttaaaaatttagctgccagtatttaaaaatcaagaaattccaaatgaaaatctggagttttggctctttgtgggggaaaaaaaaagctggctctggcaacaggcaacagtgggtttgtttgtgtaatgccaagggatgctagactgaggtaataggtgcctccccttctgcctatgctggttgtgtgcctcagtttccctccactgccagctggtccacttgacttttagacttgacctgccttggctcatgaggcccgcaggtgcagtgtttacctatcccagtgcagaggtcttgcctgacacactgcagtttggttgactccatagaaaacttggttgtgacagtggacactaaggggaggcaggaggaggaggccctctgcacacggccctgctcagacctctccatctgcggactttatagcccagccctggaattttggaaagttgcccacatttctctttcaggttaagccagagctttcagggccaagcaagctgtaaacatgtgagtaatgaggacagctagcttttcgtgtttgtaccgggcttcacagtttacacctcgcctcctcctccattatcacatttgatcctccggggcctgccaggttgctttgcatatgtgcattttaatttcaagaagtcttccttccaagtgtgtatgatgggatgagtaaattgattaattggcataacttattttgtacgaatccaaacctaatatttatgcagaggagggaacatttccagaaaagaggtttccaaacttattttgaaatctctttcattcattattcagcaaatatttaagctctctctgaggcactttgcatttgttgttctactttctgttccaaacgatcttgttcaagaggtttgattagccccctcttaaccaggaaaaaagtatagcttagaaagtgacttgtagccgggcgtgatggtgcacgcctttaatcccagcacgcgggaggcagaggcaggcggatttctgagttcgaggccagcctggtctacagagtgaattccaggacagtcagggctacagagaaaccctgtctcgaaaaaccaaaaaaaaaaaaaaaaaaagtgacttgtttctggcctccaaacctggcctctgactttcaatactttaactttttgttcttggaattttttttttttttttaagggtctcactgtgtagccctggctggcctggaactcactgtgtagaccaggtttcaagctcagatatttgcctgtctctgcttcctgagtgctgggactaaaggcatgcactatcaatgcctagcctagacctcgaacttctgatacttcttcctctacctccggagttctgggattgcacaagtaggcgccacgatgtatattttattatttatgtgcgtgtgtgtgcgtgtgtgtgtgtgtgtgtgtgtgtgtgtgtgtgtgtgtggcacttgagtatgccacagcatacatgaagcggccagagggcaacttgtattctgttctctccttccatcgtgtaaagccctgttcaaactcagattgtcaggtctggcagcaggtacctttatttcctgagccatcttgtctggccgtccctgtttttatatggttctcaggcttggacccagggtatcaaacccaggacttcatgtatgctgggcaaagcactgtaccaactgagctgcctttagaacccaggactggttaacctttactcttgagcctctcccctctgatctgatgctctgtatcgtatggatcttgaactgtccaggcctcataggagtgttgagagctcgtgaacagagagagaagaggaagcagaaaagagccttggaatgaggggaactatctcctcactgaagtcctcagctgagatgcagtcattgtcagctgactgctggaactgtggccagaccccatacgccaacacacaggacagagcctccaggaggccactgcccacctctcttggatgtctagggtcacccaggagtgagtctgacctgactccccaaggtcaaatggaagttgagactcggagtgtacctatcctgctcagactttgtctgagtccccaacccaggtcgtcacctcttcttgaacatttctttacctcttagacctctgctgtttggtggcctcccttcatctcttcagatctgtttcgctggcctaagaattgtcagagcaggaccacttcctccccacatccgaagcagcttccaacctctcaccccccctcccagaccttgcgaacccctgggaatctaggtggaaagtcatcacttccaatcacagcctgccaggtcagctgtgagacggcggccaggaaagcctagtttggccacctgccacccagtgcctgccacatccttcctcctggctctctccactgcagtctagtggcttctgtcaggtccctgatgctctgttctcacttcttcccccgccactgctcctgtgacaggcctcagcacatcccttgataatgaccagacagacagggccagcttcagttctcaagtcctggctgctgtggctctgtatctgtccccttgccccaggaacactgtccttcaagcacaacagcacatttggctctgctgtcactattttgtgttgttttggagagaggaggctggcctaaaacttgataagcggagtgtgaccttgaactcctaaatttccatcctgctcccaaatcctgagatttgagcaccatagcagttaccgcagtactgggcgtctaacccagggctacttgtctagtcctcatgacacatttgaaagcacacagtctctagccaactgtgaggtccttgaggacaagagccaggtttctgttcaggatggtttccacagaccagcacaaaacctggcacacaccaaacatgtctaacgaacacttgatggctgactgagtacctaagaacttggatgcagacaaggaagccctggagataaataaaccctcaaggtcaaagagcagccttagagctttggctccatcctgccaggtgggaggcactgtcctggtacctgccttgttgtgatcccagcaccctcgaggtgcattgaaggaacacagtatctggctaggaaaggcactgagctctctgaaatatgtgccactgtgagctgcaggcatcctggaaacccaggtgcctgcctctactgtacagtgtgctctaccccactgctcagggtcctctggccagctgtggtccatagtacctgggaagccaagacgcagaatctgtagctctccctcaaagatcctcatgctttctgagagccctcttctctcacttcagccttgggccatgtgaagacgacctgattttctctgcttttcttatggggaaaaaagtagggaaggcaggtgtggcacctcacacttgtagtctcagaacttgataggtggaggcacgagggtcagaagttcaggtcactcttgtcttatagctttggaggccagattaggatacataaaacctagtaacggaggagtgggctgagagtcagccaaggctgctctgctcagagtgagcgtgaggacaaacacgagccagtaaccatgcttagagtaaatctagcgcctgccctgtcacctggatattgtctcactgtaaagagaacttggagtagtctttactggatagtctctggccaacaggttaagtgcttgaagcccctgacctcctctgtccccaggacctgaggtaacttggagtcatgttcctgtcctccagagccactctggaaggcacaggcacctagcccagggaccctgagtctgagccaggagcatatgggagtaagagctctggtgttcagagacagacagtttgtggtctgctggccagactggagaggggaagagtgtttgcgtgagcgcgtgcgtgcatgtgactgacagtgagaaagctcatgtaggtatgcgcagtctttcagggaaaaaattccagaaagaagccagttggaaactttttcaagaagtctccatttggaagactccgggcctggatgactggcaaaggacacaagggataatggtggcagtgcaggtcagtcagaagccctgaaatccactcacggcctctgttgcctgttgtgaaatatttagcaaactcaaccatgtcttcttttcaggtaaaattttcttgtagtctaatgaataaatcaggccaaacagtggtggcccacacctttaatcccagcactcaggaggcagaggcaggtggactgctgaagtcaaggccagcctggtctacaaactgagttccaggacagccagggctacacagagaaaccctgtctcgaaaaaaacaaaaaataaaaataaaaaataatgaataaatcagtcctggtaaacgtagttaaaaaacactggggtaggaaggagtgatattcaggaaactcctaggtcccgtacatagtctaatagcctgggccagcttggattcctcactcactaccctcctctggctgctgcatggttgctgcagcagctgttgcagcctcagcaggagccgcgatccagggcaggcacccccttctggcagcctaggtcatgggctgagcaccgaggtccgagggaggggcttgccctagaggtgggaggcccagagcaggcctgagggggaaccccgtggaaagtggggagcagacttgtgggtgagaggacatggaggaaacggggaggaagagacgtggtggatgagatatgccttaaaaggccaaccacgtaccctgtactgggagggcgtacaccccccacccacacaagggttacagccaccacgctcctcccacacaccacctccacgaggcccagcgacacgcctgcctaccacggggttcacagcccacggggtaaccagcaggggctctgccctccccttctttctccctccctccctcccttcctcccttcagcccctctagatggagcccggcacacgtggcgatacagagcgttctgggcaggtgcagagagaaacctcaggtctgtctgttgacagtaggggaaagatccaagctaaagattcagagccataaatgctgtgggtggtttccacttctgagctaggagatgtaccaggggctgttttttttctgtttggggctctttgttttcgtacccacccacctccaaccccccaccccatgcacaccaagctacatgagccaaccttagcgaccttcctgctctgggcccaagccctgtattttctcagtctcaaagaaaagaattgaggcacctaggtgaagaaaggcggccgaattttccctacttaataggaaaagccatacagccagctgcctgccgcggagctgccgggagaggagccagagaagcgtgcagaaatggcaggaagatgtcactgccctcgtgtccggcctatgcgggcacaaagagtccttcctaaagatggcgctgtggagaccgctgctcccagcccagatgtccctcccaggaactgggatcagtgcccagtcccggaactttgagaaaagccaaagaaacagagaaacgtgtgcatcagggagttccttagggaagggaagcatgctgacaacgtacctactgtgcgccaagccctgttcatgcactcattgctcacaccagtccttagaacatgtcactttggatcagtgaggacacagcagaggttggggggggggtcatggtgaagaggggatccagacttagctgggtggcacatacctttaatcccagcacctgagagaggcagatctcagtgagtttgagaccagcctaggctacagagcaaattcctagacagccagggctacatggaacaaccctgtccccatcccccacccccaaaaatccttatcttaacctgagaaagagccaggaatggagggcagtttccatgttggtagcagggccataccatttagaactgtttgtaattggagctgtttcctggggtctattcccactggcccattgtctgtgccccaacaccttttcctaccccatgagaaaggagtaacagcctggttccttcagcccaacccctgctctgcccctccaccctcctgcccctgctctgcccctcctccctcctgcccctcgctctgagtgagggctggggtcaagcagcaggtgatggctacttcagagccccttttgtgtacttgagaccagggtccaaaggccagaagccatgcccctgagttctgtcttcttcctgtgttcttgggcccggaacctggaccagggtctctttgctccaggccttgcctggcacacgggtatggtctgtgtggacggcacatgaacaagcaaacactaggaggaccctgatcccatggaggcccccaggctcctctgagccacccccgtgactccgtcaacagtcctcttgttcttccctttccacaggcaaagaacagaagcagaccaacatcgaatccatgaaaatggaggcaagtgttttcctcacccacaggggccctgtgggtcctgattctagaagaaaaccacctctctgatggactgtggcgagtgtgtgtgaggggcccgagggtgggtcctgccccatctttggttgttccttgtgagagggagaggaagtgggggtggaggttggaagtcccctagtgaggcagccagctcatccccctccagaggtcaagcacttcccctctctgccttgttcatgagtccctgccaactcctaatccctcctcagagggtcagcccctctggccaggaaccagaatttctatactctgggatgagtgacccctctcagtttcccctccaggaggaatgaaccctgcagagtacctgtgcccaccttaatacctgcctgtctctctgtcctagggctcccggggccgactgcgaggtggcttgggctgggagtccagcctccgtcagcgacccatgccaagactcaccttccaggcaggggacccctactacatcagcaaacggaaacgggatgagtggctggcacgttggaaaagggaggtgagacgccttttatccttgatgccaagtgtggaactggcaaaccaaaagccagttccagccgccctctgggacttttgttgggctgtagctgagactgtttccccctacggttaactcctagtgcttccaggaactgctactaggcagtatgaagttcagttgtcctttatcttgttatgggtgctagctgtgcatgaggtagtatgtgcacacaggcaggctctgtgcttacgcgctctggcagctgtggatggagttgatgttctttctgatggctgaggacagaaccaaggggaatcggcggctcagtgggacctgcagtgcatgggcaaggcgggtctcttggaagaggtaacatttgcattgtgtaagtgtctagagaagtgtggacagtgaaagaaatgactcaggtgcaggtgacagccatggcgacaggcacttccactggattttggcgatgggatcaagggcatgttgatagaaaggtcagagaactgctacagccagtactgtaggtctggcctgggctgttgcctctgatgggaggactggctggtgggatggcgcgttcactgtgggatgccagggagctggaggctgggcttgggactgcagagaccacggtgtgagaaggcagggtctgtggggcctactcagtagagggcggagaggcagaggctcagaatttcatgcccagagatgccaacgatttggggcaacgagaaaggaagagcagcagccgtggggctgaggttcccaggagaggtgcgtgtgggcgagtggctttctcatacagtagccatgcatgcaggctggggccatgccccaaggtagtcaagcctgagagagctgaaagcagcccagagctgggaaagggaaaggggaagccacataaagatctaggcgtccattagtcccctaaggtcagctttgggaagggagggtggtgggtaccacgcccacagggagggaaggaagcagggttttgacctcagactatatgacagtatgtgcttgctggtcctggagaaagttccaagcaaggggagggaagggtcatggttctggctgctttattgtttccagttcctttgggatccaggaaggcagaaagcatgcttctgaaagtctggagaaagggcagctcggtcagggtctgagaggggcgcttttagcgctgagactgcacggtacagcttcagacagtgagctgctctttcttctctcgggaccttggggatcagagagggtctgcttcacaccagtctgtgtagtgcctctgctcttgaaccctgaggcagaggtgctgaggtaggtagacctgggcctggtctccttcaagcatcacgtggaggccacccagagccacaataagaaggatttctcccactcccagaaaatgaagttttttggtgttttgttttgttttgttttgttttgttttgttttgtttttcgagacacggtttctctgtgtagccctggctgtcctggaacccacactgtagacctggctggcctcaaactcagaaatccacctgcctctgcctcctaagtgctgggattaaaggcgtgcgccagcactgcctggcttgaaaatgaagattttttttaaaaaaatcaattttaggtttctgctaaaattttaaaagatttgagtggtcaagttggccccagccagtaaggacacttgtcactgagcctcacacaggagagagttctccacacacacacacacacacacacacacacactcacaggcagcacacatataaacaaaccaataaatgtaagtaacattttaaaattttaaattaaaaatatataagattggggatcttgggaaactggagaaggaaaatacatgtttgaagccacctgagtctgtgggacctcacatagttcaagcccctctcccactacatagccagaccccactcccaaaaaaaaatttttttttttggtttttcgagacagggtttctctgtgtagtcctggctgtcctggaactcactctgtagaccaggctggcctcgaactcagaaatccacctgcctctgcctcctgagtgctgggattaaaggagtgtgccaccatgcccagcaaaaataataatttaaaaaaataaactagcagcattggccagatgtggtggtgcatgtttttaaagatttatttattatgtattatatattatttattatgtattctgtttgcatgtctgcctgcaggccagaagagggcaccagattttactatagatgcttataaatcaccatgtgattctgggaattgaactcaggacctctggaagagcagccagtgctttcaacctctgtgccatctctccagcccttggtgctgcatgtttttaatcctagcactcaagaaggaaagtccagttgatttctttgagttcaaggtcaattttatctatctagggagttcaggccagccagggctacatagtgagaccctgtttcagaagaaaaaaataaggaatatttgctaatatacacaaaagtggaatgggagattttattgtataatctatgcatagatctaaccatatatatctatatgcatgtatctgtttcctgcttcagcaattattaaaagcatttctagtgagtctgctaggtttggggtttgcttacccgtcccaaccaacacaaaggcttctaggtgttaacagaaatgtggaaaaaattaactcagtttgaattgttagaggagcctatgacctggagtgtggagacctcaaaacacaatgtactctatatcagtgaaatgaactctgtgacttccagtgcaattagatctgtagaacttaaatgaggactatacactgtacatcccttgatccttgactggccacaagcccccagggcatatggatggggtggagctagtacttagagtttaggtttcctaacttcaaggagttgggctctaaatgccacaccctgctagggacagagaaggactaactaactgctggtgaaacacaggtagctttccagactccagagcagaaaccgatgctagcaggtcagttcctttgtcttgtcttgtcttgtctcgtctattcttgacttgtctcttctcttttctctttcttttttttaatgtgtctgactgttttgtctgcatatattgtatcacacatgtgtgttgtgcccacagaggtcagacgggaaggctgggtcccttggaattcgattcatggatagttatgcaccaccatgtgcatgctgggaactgaactgggtcttctatgagagccagtgcctgtaactgcggtgctagctttccagcccccaggcttttccaggcctgcttcccatctctaagactcactttggctctttaccctttgagcttcccttctgatgttgcttccctgggcctgctggtgccccggcagctcacacttcctgcatctctcagcagaacagtccatcccttaactgggatgtgctccagtcccctcttcttgatctacataacacatacctgcattttttgactttggggtttgtttgtttgtttgtttgtttttgttatttgctatgtaactgaggctcacctgaactcctggtcttctggcctctacctccaaagtcgtgtgcctttgcaacccaccttcatttccccagtgtacagatttactagaagctttcataggtctaactacctgccctccccactcctgactacaccccttgccttctccactccaccccccacacacttcatgcccctacagcacctgctccaggcacgaccaccagccaacacctcctaaccttggaatgaggcacccatgcaagctttaaaacttcttcagggacactctcgagccttctgccaggagctctgctagctcagtcacctacagagaacacagggctctgagcaggcttcagactagaggaggctagaggtggctttgggctcttagaagacgaactggggtttcagggaggagagaagggagcatttcagaaagagattgctttatttgtgaaatccccaggccttttctggatggaagtgtgaagctcaagtctaaagggcttgtatgccctgcgggaagcttccactagcatccgccctgcctctgcctcacctaggagacctttttcaccctaaagctgctttcccagggtgagggatgtagctcagagggagagcacttgcctagcaaggaagcccttggcttcagcctcagcactacatacaagtagcagctccttcccttcccagcccagttcccgcttcctccatacctgtcattcacattttagctattgggtaagagctacacttttcacctgtccatgattgtgaggtggcacatgcctttaattccagcattcaggaggtcaaggacagcgggtctctgagttcaaggccagccctggtctacatagtaagtgagacctgtctttaaaagtaaataagtgatgatttaaattgcacaaaatgaaataaaatagatgataaggaaaagtggccatttcctttatctctgactgggaattcttgctggagaagggaagctgttgtcttgggtctgctctgctataatatatgaccaaactctgttccaagacccacagcagctccctcatgccctgacccccacccgcctccagtcacgtatagagattctggctgtttcccaaggtttcaatcctgtgacctcccaaatcagcccagtgttaggactccatggtggatgggaggactcactcattaatcctttcacccagaccaggttctaagtcactttagggctggagtcccatattccagacaggctctaggatgtctgttatcttccctgactctagcttgaaggatggtccctggcttaagcatctctatacttatcagaaaatattgcatggtgatagtaacaatctgtggcctggccagagaatccctgactccctcctgcccttaagaccctgcctacacccaaggctgtccagcctggaataaaactatcacattcctgaggggagggtctttgttcctaacccttaggaggcactttgcccttcatcacttacccactctgggctctgagactaaagcaccaagctgaggcctgaagtggacagggaaagcaagagtcctaagtacagaagtgcgggttcatgaagaatgtgcagcctttcaagccccttgccaagtgggcatgaacaggagcctggttattgtctttaaagtccttcatgttattttgagataaggtttctctgtgtagaccaggctagctttaaactcagatatcttccagtttcttcctcccaagtgctcagatcaaacgtgtgtgctgtgctggcaggatggctcagtcagtaagagcactgactgcccttctgaaggtcatgagttcaaatccgagtggtcacatgctggatcacaactacccgtaatgagatctgatgctctctttgggtatgtctgaagtgtacttatgtgtaataataaataaatctttgggccagagcagtcatgcactgaacgaatggggttgagtagagcgagcagaggtcctaaaaattcaattcccagcaaccacatgaatgctcacaactgtatactcacatacataaaataaataagtctttaaaaaaaaaaaaaaggtgtgtgccatgtcaccaggcagattactagtgtgtgtgtgcctgtgaatgctagggagtgcatggagaggttgaggacaactttgtggagtctgtgtcttgtccccacaggtcccaggaccacatcaggactagctggcagatagctgttccagctgagctgtcttgctggcccctgtttttactagtttctgagacaggacttaacagtaaaacagtctaggctggtctccaacttttccagtcttcttacctacttccccagggccggggttttaggtatgagctaccaagtccagctgatatgatcagttttaaaagttactttacattatgtacgtattacacaaatacattcttattttaaaagtctcccccacacccaacccccacacaatttaatccagtatgcttcagagctggacacagtggtgcatgcctgagatcccagcactcaggaggcagaagcaggagaaagagcacaggttcaaagccagaatgggttgcctagtgagctccaggcgagcttgggctacagagtaagatacagtctcaaaagtggcacacacacgtagataatagaatccttttggaggctgttgctgtgtgctgtgtacaaggcacagttctctgtccgtctgcgggtctaagcctgcctcataggcatgtacgtctgtgactggaaccattctgcagtttcactttacagtttggcttttcacttacaataaggctggccagtttggccacataattcctagagtatttccactgtaggaattgccatgcttttatgtaaccaggctctgcctgctggccctttccgtcgtcgcagcatcttgctatccaggcatgttgtagcagtacacatccttggtgtgtgagggaggttgcaggtagcccaggctggtccaagcctggtatgtagttgaagatcatgttgagcctcagccctttcttcctttacttcctaggtggctgggttattagttgtatgcctcagaccgttttctgtggtgctacgaatcgaagcagggtctgcttgcatgctaggcttagcctgcttctttgtgcttttgtttttccataagacgtaaccctaggaagagaaatccaagtggaagaagtgtgtattttgcattttacaaattgctaggaaagagcaacaccgaagtccagcttccatgccagtcagcctgcattctgcaatcggagtgggggggacagggtgtcttgttaggattttaattgtcatttcccagatgataagtgaggcttggttatcttctcatgtttattgaccatttgtgctgctggtgctgcttctgggagttttaacaaatgtggtggtgtccatttgtttacaacctggggttgtaacagactgtttcctgtctgtctgtgagtgtccagagggccacctcttgctgggctatccaccatttaataagcaatcaccctgcaccccttgagcaggagctttgtgggagaggctatagaatatgagatggtaggtgtgatctcttccgctgtggagatcagtaaatttaacagcaaaggagtagccagtggtatggatgcttctgaccgagacatccctcactcttgccacagccaactcttgcccttgggcagtacctggccaccctggagaggacaggaacatttgcagctgagacaaagtaactttaccaaaagggtgagtgagttttaaaggggatcccatgaccaccgtaattagaaataacctcctgggttgccctgaaattgtcaaaaagaccaccactgtggattaactgcggatgggctagggcattttctgttgtttgggggcagttaatccagggtggccttgaaacttgactctaggaaccactgtgaactcttgatctcttaaacgctgggattacaggtgcaaaaggcccagctttggtgtggatgggtttgtctgttctgagaaagagtctcccactgtagcccagactgtcctagaacacactcgatagcccatgctcggctctaactcaaggtctgacgctgcacacttagttcattcacttctgggcacagaaagagcagctttgtgagcatcttccacttaagtgagggtggtaaccacacccagggcgcagctcctggctacagctaaggatgaacctggggaagggcttgcgcttcctccaccacagacctgaggcacatcctggcattgattatgtttggcttgatgcttggggcagacacctgccactgtgcctgataacctgagttttgtctctagaacacatgtaggtgaaaggagagaactagctcataagggctgccctctgccctccactgtgaccctgcatacacagacagacagaaagacagacagacagatgcacacacactcacacacgcaccccaaaaatgtggaaggtctctggtcaaaaccttgctatctcaggttacttctctgacccccctagcccggctttcctcaggtgcgtttgtcttcaaagctggtgcctggctcagcagatagaccctctagcttgctggccttctaggtcctgctgcctgggctgaccctcaaggccatcctgtgactcaggcctgcttccctgtgccctcaccctgcccttgtctggctgttctctcaggcctgcttgtctgaagttgtaaaattggattaggatgatgttggaatggaattctggaagcctggtttctagtcttagcttctgctccagatgagttgatcaattcagtttcctgatttgtagtgtgatagaaatagattgcctaattccaggaattccagacatttattatctgggggtgggaagggctggaatcgggatctaccactcgctccctctgtcacctacactacttgaaacatcagtgctaagttaagtatctgagcaagcctcagagctcacatctcctagaagtgtgtctgaagcatccttaggagaaggattatagaagaatctgtacattagttttgctttcccttctccatagctgtgctcctcccttctctattgttttagattctaaaggcccagagctgaatacggaggctcatgactacagtcccagtactcaggaggcagggggcagatggatctctgggtttgaggccaacctggtctatatagtgaatcccaggcgcatcaaggctacatagtcatagggagacactgtctcaaaagcagaaagatgcataaacaaagcccaccatggcatgttggcacatccggtggagagaggcgtggaagttaagagtgctggctgctcttgcagaagaccttttcgtccctgactcccacatgtgtgggttcacaagtgttttccagctccaagggctgtctctgccagccttagcctcttctggtctttatgggttcctgcatttacccacacagacacatgattaaaaataaaaataactaaaatcttaaaagaagtctagagggattggagagatgttcggcaggtaagagtcctggctgctccttccagaggacccaggttctagttctagcacccatctaagtgcagctcacaactctctgtaactcttgtcccaaggggtctggctggggcaccctgtctggcttccatggacactgcatgcatgtggtgcacagacacacagcaaaacacccagaagagacagagggctgggggttgtgggcagatggtagaatacttaccatcatgcaggaagccttggggtctatttctaacactgcacagactgaatattatggtgctcacttttaactccatccttaggagggaaaggcagaaggaccagaagttcaaggccagccagagctacacaatattgtattaaacccctgggcatggtgatgcccatttacctgcaatcccagtactcaggagacagaagcaaaagaagcactgcaagttctaggccagcctggtctaccctgagttctaggccagcctggtctaccctgagttctaggccagtctggtctaccctgagttctaggccagcctggtccaccctgagttctaggccagcctggtctaccctgagttctaggccagcctggtccaccctgagttctaggccagcctggtctaccctgagttctaggccagcctggtctaccttgagttctaggccaagtgagacttttaaaaaacaaaacaaaaacaaaacaaaaacaaaataagcaaccagaaaaacaaaacaaacaaaacatgattttttttgcccactaatcaggggaggtcccagtgatggctactgttggggagctcgagccctctctctagctccacaaagaactctgtgttttagtagagggagttaacaaacttaactcagtgttgactaatgatgcagcttattgtgctagtggcccgagacaaatgacacagactgtcccagagacacacactggcagaggaaggaggctgccaggctcagagcaaacctgtcttataggcagagctgatctgagcagtgtagagcagagaaaagaaccacaacttgggggaggggcaggggtcctggaagagactttcttggagaacatcaccattcagtagacaattcggaaaaggaaccaccatgggcagagaggacagggagggccgaagctgccggcatgttgaggtggcaagagatgtggtatacagggtttgggagagaattcgaggagaaagaagactcgagaggaagctgctggtcagaccatagggaccttcctgccgtggggagaaattcacctcagtgtgcagctgtgggcagagagaaccggccgcgttttaccatgatttaccatgatgtaagggggctccgaaaggggtgcaaggagcagaggaagtaaggggggcgctacgtttagcctttcctgagggtcaggtatggagggcagaactaccagcctgggctacagacagagtgatgcctgccacatcaaaatcagaacaggcaggctgttttctccagcccctgtcatataggccatgagtgacatggggaccaacagaaatcaacaatcagaaaaacagacctaaaaagcaagaccacgacagggagcggcttctgggagcaggtggccaaggtcagccagaggactgagaacatttctgcttctggttttgctcattttgaggagggtctgtttcatggtgtcagttcaggctggccttgaactcattctagagccgaggataacatctaactttctgtcttcctgccctggcctctaaagtgctggaattgcaggtatcagccgccaccactgggcctggggccccttctcccctgtcctgggctcctcctaacttcagtcacctggcctttcaggcttcacatcacagctgcaaggagtgcagttttatggtttgcagagccacagtgccctgcgttgccatagaattgccactcttcccggcctctgtcagcctgtgtctgtattccagctcagatgggctgaacaagaacaattcattcttctgtatgtttaaaaactgatgtgatttgcaaggaaatggtgtgtgtgggggggtggaaccaaagttcaggcagcaaacatttagttgaactcactttttacatcccaaggatgctgacagaagtcagtggtcagctaggtgtgctgtctgtcccactaggtgggaggatcacctgagcctggaagttgaggccagcttgggcaggagcagattctaaaaaaacaacagcaacaacatatcaatgttttaaagagtatgtgttgtcctacatcacttgggcaggcatccagagacctgtcctgagccatagaagccagtctctgcgcagcacctcagcaggctgggtatcagccctgaccctggaggctgggcttattaatgtttgagaaccactaggcctctggaatgaacagaactgaacctcgcctagagccccgaagactgcctcactttcagggaggtcaaccaggagctgtttgtttaatctgcctggggcagattaatcacactgggaattgaacgacagctcaggtcttcaggtaattggacagtgcctgctgctggggttgcgactctcactttctaagcctggttggggggggggggaggtggaaaggccggaaaggacccaggctttgatttaaatttcctcttccggatggagatggaggccaccccattgttttcggcaatagccaagccagcattctgggctcctcccatcttctttggaccctgaaacttgagagggtctgcatgcctgaatcagaatggtggtccctctgcctcttccgctgacccctggattctggagaaaggttgggggaggggtagaatactgtgttcctcttggcacactctccctactgggggtgattagcacctctctgcagactgaggtttctccagggtgataacatccacttgagcaaacttatcctcaggtactttctgctcttgtgttagcccctctagcttccttaatcccatcggtattggacagatggtttctctagacctattagactggttagagaagctaggtggtcacgtagaatcctgtcatcactgtctggtaagtgagccctgggtctgtgccgcatagccttccccacccccaaggtctcctcagtgtctcttgcccaggtccccagatataggcatcagaggaacaacagtgtaggcataggcaaaagggaggctggctgggggactggctccagagctgcagggaaatgggcagaagatggatggccatggtggcatgaggaagatgtagcaggaacccacaggcagcctggtggattggagcttccaagtatgggagagaacccaggagctcggtagggctggagagtgcttgggctagtcacacagggtgggtggagtcaaggagtcagcaagaaggaaggactggcttttaggcttttagtggatcctctaacttcttcattagatgctgctaatgggaattctcccaaggtcagcaggctcaggccactgcccgtctctaaggataaatgaatatggcttacctcatgcttctcacaccatctgcttgctaccaggaaaataatgccattgcaggtgagctgcagagctgcccaccctgccctaaaagcttggaggttacatctatccctactttgcatccctggaattctcctacctttgctggtcctggcagcctctgatttccctctgcacgtggaggaggcatcactagcacatcatttaccgtctaattgctgtcttgagtgagggctgtggtttatgtgtggtgggtcctgggcacacagttaggtgtgagtaacaggaacatggcagctcatctcttccaccttcttccccacccctcccccatgttcctcccccagcctggctaccgcaggtactcctgactcaactatcttggttgtacatgtgtttcagggagtctcacaattgggtccagaaaatggatctggttagtgggggttgggtgtgtgactttgggccaaatgctactttannnnnnnnnnnnnnnnnnnnnnnnnnnnnnnnnnnnnnnnnnnnnnnnnnnnnnnnnnnnnnnnnnnnnnnnnnnnnnnnnnnnnnnnnnnnnnnnnnccaaaccccacccccttcccctccatcccccacagggaacagcttgtccattgctttgatttgggggtgggggggaggaagctctggtcagcattgagatgtgggagtgcctctcttttctagaccactttctcagcagttggtgactctgaccctcctggtgggctcagtcctctcaaggactctgttactcacttgtaaccagcacacagcctgagctttctgaagtccccaaacttggctgatgttagaattacctacgctagtttaaaaagagccgcggtctccagccacgcctactgatccgcgtcggcagggcctgctcatcaggatttttaaatcttcctctggtaatttcttgttgttgttgttgttttgttttttgagacagggtttctctttgtagccctggctgtcctggaactcactgtgtagaccaggctagcctctgcctcccaagtgctgggattaaaggcgtacgccaccatgcccagccttccctctggtaatcttgatgggtttaaaccccagtgagtgtggacctcttctgacaaggacacctgtgagaggctaagggagaggaaaagatggactgcccaatgtggccttccttactgaccttcctgggctcccaggagcctctggagcccccagctgcttagcaggtgtttcctggtcccattggttaagccaagtcttgacccctacctcatcccttaggagaagcctggagggagagaatgaaagaaaaggggagatgttgccataacaactagctctaggcagaggcctcccttccaggggctggtactttaccccagacctggtggttgccatggagatgaggtactgagggacaggggaatatttaccccacttgaacagtagtcagaagctgccagaaggcagagcatctctaggtgggagtcccccagcccagcctttgctctcctggtgaatgtctgacactttctcttgcttggttgctctctctctgactgtttccttagcaacaagtcctgctaactccaggctgttggctctgaggctatttttagcttcactgccagcagctcagtcctggtcatttgcttgcagcctccatatgggttgcacaggaataggaaaacgaacatttcctggcagctttggagagccctaaaccaggacctcctggcaatcattagaatgtctgctatgggcaggatctgtctgcagatgaatgcagggatgcatgtagacaggaagctcctgaggcagtgttgcattcagctgcagtattcctccaccattgcagcaaggtgccctgtccacagtttccacaggaagacaggaaggaagattctgtgcctgccctctagggaggtgtaatctcatggagatgagtccagccctcttcctaagaggcaaaaccagctgtctgtgagattatacagtggagtggcagggagcaggaaaggagtaggagataaggaacagtggggagagatgggggaggggtctgagacgccgtatccagaactttctgcgataatggggttgctctgtattctgtgcatgcacccacaatggtggttcttcaacacatataacatggctgatacaactgaggaactacagcctaatacttacttaattttaattaacttaacttatatacactagctgctacttccatggacagcccagggttagaggaactttgttggtggagaaagctggtaagctaacataagttagccagggtttcagctggtggaacctgaaagagaagggccctgtgggagggaacagcaggtgggttcagagtgtggagctatgagtacatatcagggagacctctactttgtaggggccttgaatgtcatatggaatgttggctgcttcacactgaggcttctgtggactgaggggcaagttcagagcagatatccattcacactgacctcatagcctttgctatgtctctgggtctggtgtctgcaatgagtgcagataggcagaaggaagaaaagatgtagcgatttcccatgtgtggctgtacaggaaccataggtggtgcctgtcctgtgagtgacggcagcagtggcatcaatccctccttcacatgctacggatgctgaactcagaaccaaggtttgtcaagctggttgagtgaccatcacccctggcctccaggcagtgctgctctctgtttagcgatctggcctggaggctcgccttacctctgtgcagctggaaacccacgttttcacagcttttgtatggtgctttaatgtcccaggaaagaaagcaaggaccaggagaaaggaagcttcctggcttgtcacaggacacacacgcttgccccttggagcgtaaggcttgtcaacacgacacttcctggcagtttactggtatgagtatcactggaaaatgtaataagatggagtttgtctgaagaatacctgaaggccaggtgtagcagtacacacctgtaggaagatgagttcaaggctagccttggctatgtaatgagttagaagccagcatggcttgcaccctgcaagtgcagccaagctagagagcactaacttctttctgtgaggtctgaggtgttgactgagcctgtggagactgcggtgaacaagcctgttatagtcctagtctctgaaaggtcagggggcagcaagatgagccagttcagaactcccttccattctaggaagtgagagggtcctagggatcgaaccagggtttgagaaagtggtctacggtggagctacagcacagctccaagctcacggcttctcctcccagcttgggtagcctgactaagtggcttagacactaccactgtgatagagtcgaaaggcggggggcagtagagtttcctggggggcggggagcaggtccttttctcttttaggggacgtttgtactcctaaggttttcttattgctatttttgagccagcatctcaccctgtagcccagcctggcctcaaacttgaaatgacctactagaagtgatctcccaatctctctgcttcctgtgggagccatgggggctgggattacaaagtgcactatcagacctggccctgaacccatacagtttacataaagaacgccttttcagttgcccacctgctctgatggtctcagggtgagttggagagatccccttcctggttcatcccttcacctcgttatacccgcacctgttctagctggtgtgtgccagctcactggctgggagccaggcacctggggtgttacctcagtgcctttaggatattggttttcctagctctagagggctgatgtcatcacccctattttgcagatgagaaaacagacatcttggggttaagtggtctgtgtcaaggtcaccgcaatgggatcaggtcttccccaagcgttccagccagatagcggcggctccctgctggggcattctccttcagttctttgttctaattcatcttgcaaacttaatcctggctaatctttgtaaaatactcattcaccttgtttttccagaacatctgccatgttacagaatatctccattcagtgcttgaccccagtcccactactcagccatttagctttagtcaaaattgagagggtgggtggaagagttctttcttccttctacctgcttgccacctccaaatcgtggttatcttctgatctctactgtcctatctctcacccacacccttcatttgatgcagccttctgctatctgcttggtggtttgggtagttatccacacaggagtttgcttttcagtgattcccccttcccccaccccatctccccaagtctagtggaatctatcaacttcctgagagcaggaccaagtgtccatttctgtatccgatgatgctccagtcctctaatgggggggggggcggggcgccaggagtggcgtgtgtgcttcttcaaacccaactttattcctctactgtcttcagcagggacgtctgctctcagcctgcggtaaccgctgtctcggctgatctttctgttccctgagcatgccagatgacaattgagaccagtgacgagtgaggccttgaagctcctaaactgaagtgagtgtggcgacccaaatgagcagccgcggaactcagttgggccggaggctaacttgactctttgcaacactgaggactgcggggacgctcccaccgcccctaccaccttcccgcccccgttatcnnnnnnnnnnnnnnnnnnnnnnnnnnnnnnnnnnnnnnnnnnnnnnnnnnnnnnnnnnnnnnnnnnnnnnnnnnnnnnnnnnnnnnnnnnnnnnnnnnnnnnnnnnnnnnnnnnnnnnnnnnnnnnnnnnnnnnnnnnnnnnnnnnnnnnnnnnnnnnnnnnnnnnnnnnnnnnnnnnnnnnnnnnnnnnnnnnnnnnnnnnnnnnnnnnnnnnnnnnnnnnnnnnnnnnnnnnnnnnnnnnnnnnnnnnnnnnnnnnnnnnnnnnnnnnnnnnnnnnnnnnnnnnnnnnnnnnnnnnnnnnnnnnnnnnnnnnnnnnnnnnnnnnnnnnnnnnnnnnnnnnnnnnnnnnnnnnnnnnnnnnnnnnnnnnnnnnnnnnnnnnnnnnnnnnnnnnnnnnnnnnnnnnnnnnnnnnnnnnnnnnnnnnnnnnnnnnnnnnnnnnnnnnnnnnnnnnnnnnnnnnnnnnnnnnnnnnnnnnnnnnnnnnnnnnnnnnnnnnnnnnnnnnnnnnnnnnnnnnnnnnnnnnnnnnnnnnnnnnnnnnnnnnnnnnnnnnnnnnnnnnnnnnnnnnnnnnnnnnnnnnnnnnnnnnnnnnnnnnnnnnnnnnnnnnnnnnnnnnnnnnnnnnnnnnnnnnnnnnnnnnnnnnnnnnnnnnnnnnnnnnnnnnnnnnnnnnnnnnnnnnnnnnnnnnnnnnnnnnnnnnnnnnnnnnnnnnnnnnnnnnnnnnnnnnnnnnnnnnnnnnnnnnnnnnnnnnnnnnnnnnnnnnnnnnnnnnnnnnnnnnnnnnnnnnnnnnnnnnnnnnnnnnnnnnnnnnnnnnnnnnnnnnnnnnnnnnnnnnnnnnnnnnnnnnnnnnnnnnnnnnnnnnnnnnnnnnnnnnnnnnnntccccccccggcgcccccttcccccctccctttctggccccctccgcccccaaccccaaacgccccctgcccctccccccagacgggcagctatttacagagcttcgggccggggctcacacctgagctgtactgcagaggggctgcacctggccttatgggtaggtttctggacagagtcctggggataacgggggcggggaggtggtaggggcggtgggagcgtccccgcagtcctcagtgttgcaaagagtcaagttagcctccggcccaactgagttccgcggctgctcatttgggtcgccacactcacttcagtttaggagcttcaaggcctcactcgtcactggtctcaattgtcatctggcatgctcagggaacagaaagatcagccgagacagcggttaccgcaggctgagagcagacgtccctgctgaagacagtagaggactaaagttgggttcgaagcagcctgggctgtcctggtggtttgatgggtgcctggcagttcctgttgacctgtgtactttcttgggggaccatattgtcctcaaggctctaccagctctaggcctggagagagacagtttcctcccataatacaccccactattcctgttatcactaggtcagcagccagaaaagtgagctatggcagagagtagtgagaccctcagggtcacggagggtagcctggtgttttgtgacactgggatagcccaaaaccgcgtgggtttggcggcagaggcaatcagacctctgacctttggaatgggagtcgccgagagatagggtgagggttcagctgcctggagaggtggaactggacagagaagctgtagaccgtagagttagaagcggctttcttggggcggaggaactctaggccaagtggctttcttgagctatgggtattgggggatggatggtgttgtacccctcttggaccctgcccagttccagggcttagagaccaaatgctagcgtccctagttaacccttccctttcctattgtctgcttgaggagtgagtagaggtagtgaacatgggaaggagggtggttgtgctgccaggctgagtattctaatgagcccctcccccaccggccacgctgcccccctcttcccctttcctctagcctcctgctgctaactccctctactgtgctggtcctgctggaggcccctttcctcctttgccagcccaggctgtgctgggcacatgttctgtgctggtgggttggggatgctaaagcagctatcagcagcggcatctgacaaactggggaagttgtgggagaagaattttcacgaactgtggtgaagggtgaggaggaagacaaaggagccgtgggggaagaataagggaggtggcaggcacgactcccttggagacctggcagccggggaaggaacctttacctgccagctactccttgctctggaaatggtagcaggccctttcctctgcaagcttcctgcctcgtgctgactgaggagccccaacgaagggtttctatgtcattggaggcagctgcctaagttggatctggtgtggttgtcagaagttctgaaaagcatgatgggaggagaggggcaacatttgggcaggggtgtatctctgtgtgtaacttctgcagaccattccagaagaggaggtaggagaaaggaggactcagtcccaagccaagcttgatgcacctctttgggagaggcaatagctaattggtggaaggaaggggagagcgagccctggccaggtgagggtagggtctggggaaagctgagtgattgccctgcgttcttccctagccttgagccagcttccccagccctaccaatagcgagcacttaaaatgaccaccgttgggttgttgccctgaggcaaaaacatgaggcctggaggagggtggtgccagatttctcagcttaaaggtgacctgtgcgcagctttgcaggcctgccgagcctgcattgacagctccagccagcatccttggaattattgatacatatgtttcaggtcaagaaaagtgaccagacagacaccttcagtttagatgtttaggtcagaccaactcacacagagcctgggccagtctgcggcttttgcgccgtactttgactagttctagagctccagcccgactagcttctttaaagagagatttcaaagtagcccaggttggcctcccaattaaagttctgcctgtgctaagattacagaggtgtgcatgctacactcacctccaagttgttttctgatcactaaaaaaattattaaaagttacatttacttatttgaatgcactcgctgacccccatgccatgaatgtttagtctttaagagtgcgttagctttcataggtctgggttcttagagaaatgtatggagaaaatgaggtgggggcagggaactttggagcactcgtcggggtgtgcacaaggctccaggtccaaaggttgggcaggtgtgaagatgctcacctggagtcccagcaatctggagggaggcagagtgcggtccagaacagctgggctacaaagagaaaccctgtcaccaaagccacacaggtcacggctcctttccctgctctgtccccactggtatagtgaagataagtgcagagcctgagttttggaagacatgtgccctagatggagatgaactgtgtggtccccagagctgcacatataaagatccctgagcaggggtttgttttatttctgtttgtttgtttgtttaagtcaaggtctgccttatgtgactggccatgttggacctcactgcatagaccagacagaatccacctgcctctgcctcccaagtgctgggatgaagggggctgagtgattgccagagtgcctggcgctcacagtgctttgtctcagagtgtgagagagggaaaggaggggaccttttccgtgagagaataagcgaagcttggcttgttgtgggcagaacggcagagacagctcctgatccagtgtgctgagcaaataactgagcacatgacaggccttaggtcacactgtcggacacatgtgaccaacagcacagtgagtgagctcacagtggcgtctgcgtggggacaggccttaggtcacactgttggacacttgtgaccaacagcactgtgagctcactagctcacagtggcatctgcatggggacaggccttaggtgacactgttggagatgcactccaaatcatctagaaactctgtgggaaggatttgattgccaagaagaaactggggggaacccggaaaggctcactgtctcagctgggaagcaagacgggaagagttggagcccagatccttgcctgaactgtggtgcacaattaatatttgagaagccaaccctgtggtatatgcctgtaatcgtagaatttaagaagtagaggcaagtcgggcatggtggcacacgcctttaatcccagcactcaggaggcagaagcaggcagatttctgagttcgaggccagcctggtctacagagtgagttcaggacagctagggctacacagagaaacctgtctcgaaaaacaaacaaaacaaaaagtagaggcaggaggagcgagcgagcattcaggatcattctcagcgacatcgcaggtttgagaccagccttggctgtgtgagatttggcctcagaaggtcagagggtacatgctggaccaagagggaagtttcctcggaggcaggaaggagagctgagtaggtcttccagcttcagctgtttttatttacatgacgagctgcttgggttgcagatccactgagtagccttgctcactcctggaggggtcaagatgacttcctgtcctcatttctccaggctgagaagaaagccaaggtaattgcagtaatgaatgctgtggaagagaaccaggcctctggagagtctcagaaggtggaggaggccagccctcctgctgtgcagcagcccacggaccctgcttctccgactgtggccaccacccctgagccagtaggaggggatgctggggacaagaatgctaccaaagcagccgacgatgagcctgagtatgaggtgagccagttctcttcgcagcttgagcggggcgctcctgggcgctctggctgccggctcttactggctgcttccagagtatctgttcctggcttggctttgtcacctgatgttcacatggggctcatgccatccctcagatgcccagggctagggccgagctctggggggtttcggggtggccggcacttaggactgctgtgtattgacttttgctctttggggctccaggatggccggggctttggcattggagagctggtgtgggggaaacttcggggcttctcctggtggccaggccgaattgtgtcttggtggatgacaggccggagccgagcagctgaaggcactcgctgggtcatgtggttcggagatggcaagttctcagtggtgagttggacttggtggttaagaggtcggggaagagaagaaggggtcttggtcctgtgtgcctccctatatggggtcagtggaagaagccatagccaccatcactgagctgagcagaaagcctgctggccaggtggatgttttcccactcttgatctgggcccctcttgctactatttctggtttttgtcaatgcctctggtccccccaagcaagggtccagtgactcttattgtccctcatgcataaaagtcagaaggcacttggcttacctgtgtagagaacaactgggtatagtaatccctgctgaagctcaaggatcacgagttcaagaccaacctgagctacgtagtgagtgccaggccatgcaggactatagagtgagactgccccagggaaggaccgatctaagggtggcttggtccttaggtgtgtgtggagaagctcatgccgctgagctccttctgcagtgcattccaccaggccacctacaacaagcagcccatgtaccgcaaagccatctacgaagtcctccaggtgagcatggccccacagctacagggagtttcactggtggggctgccaggatccctggacgtcggagctgtgttagccaagcccgcagcccttcttcagcctccctcctgctggtctcctgcccactgcctacccacctttgcctctctgagttgggcttcttccttcttctaacttgtccctacttttgttccttctaggtggccagcagccgtgccgggaagctgtttccagcttgccatgacagtgatgaaagtgacagtggcaaggctgtggaagtgcagaacaagcagatgattgaatgggccctcggtggcttccagccctcgggtcctaagggcctggagccaccagaaggtaaatgtggtctggtccagtgcagcagggactgggaaagccacagttggagagccgcagagcccgcacagtagggtggaacagaaatggcgtgtgaggtctgttagcccaagggcgtgtgctaccatgtcatccactggctcatcagaatctcagaactggggggcaggaagccactggggcagtgtggcaccccactgtgggtgctatgctagtatcagtctgtaactgtggtcatctgctttcctggtgcagaagagaagaatccttacaaggaagtttacaccgacatgtgggtggagcctgaagcagctgcttacgccccacccccaccagccaagaaacccagaaagagcacaacagagaaacctaaggtcaaggagatcattgatgagcgcacaaggggtaggagcctggctctgcagaaagaacggggagctccaagggaggggtggacatcatctgggtgcccaggccgggccatctgggcaacctcctaatgcaggcttgcattctctgcagagcggctggtgtatgaggtgcgccagaagtgcagaaacatcgagggtaagtgttgctcctcacacaggcatagtgcatccagtggcattgggaaggctgtgggcccagggcctatctgcatacccctccatccgttggatgcttctagtcctttaggggttggaaacatcccagtgccatcagagaagggtagtccttgtggccttgactgaagttgaccttgcctctgtcatccttcattttctcaaaggtagtgtctgcctcccctggtccagtggccctgatctaactccagggccttgagatctagaagaattaggaaagaataggattggagggccgcctgagggacttggatcgaccgagaaccctgtccttaggaatggggttttgtcctcatgacaccctatacctgggtcgtgggataacttgaagatgaaggcttctgagatggggggccaactgctggagtgtttgtgaatgagtacccatgcatgtgtgggtgcgtgtgagtgtggggcataggtggtaccctcaggggtcctcctcagttgttctccatcttattttgtgagacagggtctcactgaacctgaagcttaggaatgttagctaagctgataggcagtgagctgtaagaagagttcactcacctgccttccctcctccccagccctgatattacaggcatatactgccatgcctgaggacctcctccgcctccattttggttttataagacagggtctctgtgtgtaaccttggctgtcctggaactcactctggagatcagattggcctcaaactcacagggatttgcctgcctgagactagacacatgggcaccaccacccagcaccttaccttaccttacctttccttacctttcctttcctttcctttcctttcctttcctttcctttcctttcctttcctttcctttcctttcctttccttttcttttctttttaaagatttatttatttattatacataagtacactgtagctatcttcagatgcaccagaagaggtcatcagatctcattacaagtggttgtgagccaccatgtggttgctgggatttgaacttcggaccttcggaagagcagtcgggtgctcttaaccactgagccatctcaccagccccacaccttttctttttaacattaaattttttatatgtatatacagtgtctcttgatcatacctacaacagtttctccctgtgacttccactgggcctaatgcaacatgtttctttcttaccttcatctgccaaccccccataacctgttgagtccagttggtacagcgtacctggctgttttatgtatgcagggatctgaacttgggcctgcatgcttgcttgagccagctctctccacagctctttgctggttctgctttgtcttggggcagagcattactgactcagctggccttgaactcactctctagtccaggctgatctttgatctttcaaatgctgagattatggaagggagttattagtgttggctgccgttctgacacccactttggtaggtcctgtttcagctgtgctctggtcccatgtgggcaggaactccagggaatagatgctcatggcatcctgttattttacagacatttgtatctcatgtgggagcctcaatgtcaccctggagcacccactcttcattggaggcatgtgccagaactgtaaggtagggaaacaacccacccaaagaggtgacccctcccctgcttcttggcattgggagccaacgcctgactggatgtggtgtgggccctcacgtgtacttacacctcaaagattgaggcttgttctggtttatgtcatgaaagatcctttcatacttgagtcttggcctcacgtgggcaggagtgggtggtagaggcaggtcaggcacactgacaatagaggggttgccgtgctcttgcccttgggagcccctgtagaaggctgcagacggaactcttggtgggcagttcccctcagccttcccattctccctagaactgcttcttggagtgtgcttaccagtatgacgacgatgggtaccagtcctattgcaccatctgctgtggggggcgtgaagtgctcatgtgtgggaacaacaactgctgcaggtgagacccctgcccacacagctgcatcgtgggtcctcgctgcctgctccacccacccgacatgctctggaccagtgctgctccagctggcacttctgcctgctgctagacctcagccaatgaggtcttagaggcagtcccctcttcaatgggctttcttccaggtgcttttgtgtcgagtgtgtggatctcttggtggggccaggagctgctcaggcagccattaaggaagacccctggaactgctacatgtgcgggcataagggcacctatgggctgctgcgaagacgggaagactggccttctcgactccagatgttctttgccaataaccatgaccaggaatttgtaagtgttgggtctaggctgtcatctcacgcctttctgagactagtccttcatgagagcccttgaataggcagtggggcctgggcaggttacaggagggactgaggcatgtgtgagctgtgaagccccacctagaagccctgtagttctcagcgggaggggccaacacagcatggggagctaggggcaacccagagcatggacctgatcaatggtgttcactacttaggaccccccaaaggtttacccacctgtgccagctgagaagaggaagcccatccgcgtgctgtctctctttgatgggattgctacaggtgagtggcatgggtcctgagagactggccggcttttcctcagacagtggagatagcaagtttatatagctgatgtaactgaatgactaagaactaagcatgagccaggcagcggtggcacatgcctttaatcccagcactgcactcaggagggagggcgggtagatatctcagtttgaggctagcatggtctacaatcctgtctccaaaaaaaaaaaaaaaaaagaaggaaagaaagaagcaagcatgctaacacatattctagtacttggacagaggtcagaagctcattcctcttaggctacagagctagttcgaagcctctctgggttatatctcaaaaatgaaacaataaatgaatgattattgcttgttagacctggatatggtgcaaacacctttaatcccagcacttgggagccagaggcaggcagatttctgagtctacagagtgagttccaggacagccagggctacacagggaaaccctgtctcaaaaaaacaaaaaaaagaaaagaaaaaaaaaaaaaaaaaaaaaaagccgggcagtgctggcgcactcctttaatcccagcacttgggaggcagaggcaggcagatttctgagttcgaggccagcctggtctacaaagtgagttccaggacagccagggctacacagagaaaccctgtctcaaaaaccaaaaaaagagaaaaagaaaaaggaaaaggaaaaaaagaaagaaaaggccacctctgtggacctgactcccctgcaggtttggttgactctcctgcaggtttggttggtctgtcctggctttggaaagacgtccacctgggcagagctgaggcacagtcatagcgcacatctgtgctgatctgacttgatttgggaaaggatactgggggcatcccaggtgatcccctgctgtgcatctggcaagacaagtcttaagagcaggtgtgaggttgatggctctgctgacagcgcttgctctctgctggctggcacagggctcctggtgctgaaggacctgggcatccaagtggaccgctacattgcctccgaggtgtgtgaggactccatcacggtgggcatggtgcggcaccagggaaagatcatgtacgtcggggacgtccgcagcgtcacacagaagcatgtatgtccctgcgcggggatgtctgttttcccccagtgtcctcggctcctggggacattgccatccactccttccattcagcccatttgttcgttccttcttgtcctctcctccggcctttctttctcatttttcatcttacttctgtggcatctcagggtgatgagcagattggaagtggggatttgagaggtgaagaaagaacatagagctcttgcctagagggcctgaggcttggtttagtcctcagcttgtgtgaatggggtgggggtagattgtagagcttgctgttcagtgctccacctgctccagtggttccagggctgtttgtggtaatgagttctcgattggagaaaggctcctgtcatctaagtgcttctggaaagttcttctgccagtctccatttcagggggttcaggtagtgctggcagtttcatctctgtaatcccaggggacaatcacatgacactacaattaactcccccaccccaccccagaaggctgcttggggatggggtgggggttggcacctcccagggttccatgttgggtctgtttgctcactgagatgataagcctagaggttctctaggcttatcttctgcctcttggactcatagatggttctttccctccgcctctgtccccggacagcaggcccatcacattacctttgtcctcccagatccaggagtggggcccattcgacctggtgattggaggcagtccctgcaatgacctctccattgtcaaccctgcccgcaagggactttatggtaaggtgccctcctctgctttctaaactggtaccttctgcacttaggtcttagggatctactttggacatttctgccctggcgactcctccagtggccctttcccttcaccctgcccatgcccgggcctcaccactcactgtccgatgcagacagcctcagctaatggcttcttctttcttccaacctctcagagggtactggccgcctcttctttgagttctaccgcctcctgcatgatgcgcggcccaaggagggagatgatcgccccttcttctggctctttgagaatgtggtggccatgggcgttagtgacaagagggacatctcgcgatttcttgaggtatagaccgagaccttggtttggccagctcactaatggcttctacctgggactgctgcttcgtccctgtcttgtctgcattgcggagctgggggattggagctggggactggtggcttctctttgcaagggacagcttgaggaagattttccatgtagagaggaagcagtgctaaagacccacctaggaagaaagttctcttgttcaaagaggtgtggtggtcatcatcaaacagatggactggggccagcccagtttttctgtggagaactccaaaatcagtttttaaaatcattctctgactagaatggcctgtgctcactctctggcacccttgtgggtgttttgtgatacctgagagaaaatcatggcttatctttttgctttcatttcttgttatgtgagccccagtttagcactgagccatgtacaagctcaatcataggggattgctgctgcccaaggcattcttttcttttcttttcttttcttttcttttcttttcttttcttttctttctctctctctctctttctttctttcttcctttctttctttctttttgatttatttattattatatataagtagctgacttcagacacaccagaagagggtgtcagatctcatgggtggttgtgagccaccatgtggttgctgggatttgaactcaggaccctcggaagagcagtcaatgcccttaactgctgagccatctctccagccctgcccaaggcattcttgtggtaggctgtcagcttatagtcctgtcagcctacgctcaataataacctcagattgtaaatgtgaggacttagtacacaaacaggcttgctccggtaaggtcttatgtggtcatcagccttgtggctattacaagaatgaacctcactttaagcacacaagagtcattcatggtactactggaataataacaaagttcagttggattgtgctggctgtccagaatgttctagccagccgggcgtggtggctcacgcctttaatcccagcacttgggaggcagaggcaggtggatttctgagttcgaagccacccggtctacaaagtgagttccaggacagccagggctatacagagaaaccctgtcttgaaaaataaaaattaaaaaaaaaaaaaaagaatgttctagccagcacatgtgggatggatttaagtttgggtcttcaggttattccggtgtttggcttcctacggaggaagttcctctggggagttaagactcttggccagcccagttgcccagcagtgtttaattaatacttcctccttggtcatcttgaaaccatctcctattttacagtctaaccccgtgatgattgacgccaaagaagtgtctgctgcacacagggcccgttacttctggggtaaccttcctggcatgaacaggttggtgagggttcctggcatggggggtatgggaggaggggctgcagagctgcaggcagagcagacagcccaaggagggagaccctgagtatccagccaggattgcctctgccgaggggctgctgctgtggcaggcttcttttgctttttaaaacactttctcaggaaagtggatactgcagagttagcctcttctgttttgcacacagtaggcatggacactgagctacaactcagcctggtgtctatatagtctggctatatggtgtctatatagtctaatctggcttcatacttggcgttctcactgcttctttccccttcgtgagtgttgggatgagatgatgcctctctctctctctctctctctctctctctctctgtctgtctctctctctctttcgtttttcgagacagtgtttctctgtgtattcctggctgtcctggaactcactttgtagaccaggctggcctcgaactcagaaatctgcctgcctctgcgtcccaagtgctgggattaaaggcgtgcgccagcaccgcctagctagactgggctatctcttaacctaggaaaggacaccgtcaaaagtgggcttcactttccctgcgctgtgctgaggtaacacaacaacacagaactttagcttttggagcaaaacttttgttttgcattgacctcaaatttcttttcttttttttttattttagatttatttatttattatatgtaagtacactgtagatgtcttcagacacaccagaagagggagtcagatctctttacaggtagttgtgagccaccatgtggttgctgggaattgaactcaggacctttgaaagagcagtcggtgctcttaacctctgggtgctgggctttcctgcagaaacaggagttttttggggtttgttgttgttttaataaagggtgtcttctttttttttttttttcttttttggttttttgagacacagtttctctgtgtagccctggctgtcctggaactcactttgtagaccaggctggccttgaactcagaaatccgcctgtctctgcctcccaagtgctgggattaaaggtgtgcgccaccacgcctggctttttttttttttttttttttttttttttgcatatgtactttttgtccctgggtagtcgttagctgcctggtatgtgtttttgaaacttcttttaaattttcctgtaaggattaaggcttgtttggttgtttgtgggcaggcatggtatggagagggttgtgctgtgtgtgtctatttggggtaagagcttttgaccctccctggaggcctgttggtacctagatagggctttcctgctctgtgcttctatggtgtctcttgctttctaggcctttggcatccactgtgaatgataagctggagctgcaagagtgtctggagcacggcagaatagccaaggtgagtctcagcactgaggacagcgtgagtggtggaggatgcaggctaaggagtgggcggcttagctgtgcgacatgtgacctcttgcgatggtgtggggtcatagagccagttggccagggaatgagcgtgctgcccctccgtcccgccccggcaggtgctgtagggtcttcaacaaggttctgggaagtgcagaggcttttgttcatacccgtgtacgggctttgcctgcctatttctgcaccacatctttgcttgctgaagaagccagaaaaggatgtcaaatcccagggcctaggactggagttaaagacagttgcaagcctccgtgtgggcactgggaattggaccagtgtgctcagtctctgagccggctctccagcctcagagctttttaagttgggtgtcccaggtctcgaattcccagctcagaccccatgagggttgtctggcctccccacgttctgacttctgtatcttcccctcttctttattttgaatgatgactaaaacctttgtgtacttactttttctgaaactttgggcttccttactctatctctaaagcctccctcctcagtcgtggctgcttgtctaccatgtgtctgatctacacgcttgcctcaacagcactacacttcgagtctctccttcccctccttcaggcagcagctgagatttacagttttccttttctgcagtttttctcttaaactaataaaatggttcttcaaaaagaaaaaacacttttgttcctgtttggctgggacctgcaagtctgcagcactgagagagtgctcttctgaaggagttggtcttaggctccacccacatagtctagctttctgcctgcagatcccagcagggggccttagctgctaagttattgacatccttctacctgaaagttgctccccctgaaagagtcccaggcttggaagacttgaggggcaagctagccacagctgctgcctctagtcctgttagcctgaatagaccaagaacacccaagtgccctcttagtgagaagggaagcaggggtcagtcagccatttcctcagcaaatgatggtgactcattcctctgcctcttcatcttctagttcagcaaagtgaggaccattaccaccaggtcaaactctataaagcagggcaaagaccagcatttccccgtcttcatgaacgagaaggaggacatcctgtggtgcactgaaatggaaaggtagagtgctgggtgcttgcgtctggccagggctgggttaaaaggaaggcggcaggctcctcatttcccccaaattccctgtgagtgaactttaacaagcgctttccagcatgccaggccctggggagaacctgcacttttctgtagctggttcctgttcagaagggtccggggaccgcccaacacagatgagcccactagaaccctcagcacagtgcatggcttggatcataggtattttgtgtgtgttttgaaagccagtatagatgcctgtgaggtgcaccagatggcacccagccgggtgggctcctccttggatttgaggaggatctagacagataaggctgttctcacagactccctgagctcaccaggtcagcccagagtcccactctttgagagcccctctcttctcagaggggcatttatggatgaatcagattgaattcagactcaagctgcctgcaccatccagttctcatgtgcagggcgcctgtagagcacatccaagaggcatttcaaaggtctgggggttttgctttgttttgtttttttttactgcctttgtttctggggagtgtgaatctcaaagctgggattatactacctatctttatacccacagagaggctggcacatggcagcctgtgacaggaattcagagtaaactaacatccgccatcacacccgcactcactcccttccctgccttcctcccacagggtgtttggcttccccgtccactacacagacgtctccaacatgagccgcttggcgaggcagagactgctgggccgatcgtggagcgtgccggtcatccgccacctcttcgctccgctgaaggaatattttgcttgtgtgtaagggacatgggggcaaactgaagtagtgatgataaaaaagttaaacaaacaaacaaacaaaaaacaaaacaaaacaataaaacaccaagaacgagaggacggagaaaagttcagcacccagaagagaaaaaggaatttaaagcaaaccacagaggaggaaaacgccggagggcttggccttgcaaaagggttggacatcatctcctgagttttcaatgttaaccttcagtcctatctaaaaagcaaaataggcccctccccttcttcccctccggtcctaggaggcgaactttttgttttctactctttttcagaggggttttctgtttgtttgggtttttgtttcttgctgtgactgaaacaagagagttattgcagcaaaatcagtaacaacaaaaagtagaaatgccttggagaggaaagggagagagggaaaattctataaaaacttaaaatattggtttttttttttttccttttctatatatctctttggttgtctctagcctgatcagataggagcacaaacaggaagagaatagagaccctcggaggcagagtctcctctcccaccccccgagcagtctcaacagcaccattcctggtcatgcaaaacagaacccaactagcagcagggcgctgagagaacaccacaccagacacttttctacagtatttcaggtgcctaccacacaggaaaccttgaagaaaaccagtttctagaagccgctgttacctcttgtttacagtttatatatatatgatagatatgagatatatatatataaaaggtactgttaactactgtacatcccgacttcataatggtgctttcaaaacagcgagatgagcaaagacatcagcttccgcctggccctctgtgcaaagggtttcagcccaggatggggagaggggagcagctggagggggttttaacaaactgaaggatgacccatatcaccccccacccctgccccatgcctagcttcacctgccaaaaaggggctcagctgaggtggtcggaccctggggaagctgagtgtggaatttatccagactcgcgtgcaataaccttagaatatgaatctaaaatgactgcctcagaaaaatggcttgagaaaacattgtccctgattttgaattcgtcagccacgttgaaggccccttgtgggatcagaaatattccagagtgagggaaagtgacccgccattaaccccacctggagcaaataaaaaaacatacaaaatgtactggtgctttctgtctaagttgccttttgtgtgttcttttataaggccccaccatcccctctgcacatggcagctccggtcctggaatgtgatgtttttggtcatctctaaagactgcagtttcatacttgggaggctgatgacacctttattataattattcttatggttctggctataattgttttaagattttctttcagaaaacaaaaacccaacacccttccctttaggtttcaaaccaaggtgcgggggggtggcaggtgcttttttaaggaccagtggctctggtgccctggctcccacccctcaggccaggtgagccactgggcaacaagctaggcagccagggagtttgaggcccaccctccgggccagtcactcttctcttcttcttcccttcctcgtgagtccggtgtgtcagggctggagggaggccggggcagcctccctccttgtgtgtgtggttggagtggcgtgtgtttcttttctagtgtttgctctgatggctgtgctctcacttgagtcagcttcacctgggccatgtgctcgcactttgttccgctccccagccagggcaggcagcctggcattggcagcgggaagggaaggtgtgcttggccccagggtgagggcttgcctggatggatggagtgtagatatgtggcatatagagatatatattttataatgggaggggggacggcacctcctgggaccagcagagactgggaggtgtgctgtcaagcacatggtcccaagaccgcatccctagaaagatggggcctatgataggccctatataaatacatagatagggtcatgtataagaaatatacacagagggggttggagggagtgggctctgtgttgagcctgggtccttcccgcagacagccccacaaacagtatatcagtctaacacatgcacaggaatctatttctgtctggatgcacaccagggagcccccagcacacttctctgcaggatcaggacgatggagtcggctacacagctctctctcgtacatctgttgccctgatgacaggtagactcgatcccagaagttgctaggtgctgaagtcaggaaaaggaggaggtttgatccaagcaggtgcttcctctagcaggtctgtgttgtattccctttgcctctggtgatgtcagcttctgttagcagcctgtggttactgacctgcaactctcggcaccagtcaagtcagccctcagcccctacctattctccccaaccaaagtcgaactgaaatctctcttggccatggggcttccattgggaaaataaaatgttaaaaaaaaaattaaaatgggacagtgaacctcacttttggagtaaagcaaatcagtaattagtgctaaaactagtcagaggctttggccccttgctcactgctcgggactaagcttggctggtggcttggtacactgcttgggctgtgtagtcctgcccacctctgctcattttctctggatagagttttaagatcgcagctagtttcccctgccatggcaggtatgactatggggctggagcatccaggagagggggatgcttgccctcttggagtccctgtactaaatgtaacgtcctcccttgctccagcagggctccattctgacctggagtccaccagcaccatgcaggaggactggaggggaggaaggctgctttaggcagtccaaggtgctccctccccctctagcaatggcaaggtcttcccagctcctgtcaggactgtcttcaaaggccatctctgcccaccgcatatgtgacgaagctagcctttcccaggagcctagtgccgcctcagctgggcctggtgctcccgtgcctggggttagtgtgagggctcaggaggaggagttcccaagggactgagtagaggcttccaggtggctgaccagtactgacctgacacggtccctgatggactcctcatggggcgggcatcgggtggccttctctagctttccttccagccccatctgtaggcttagtcttaccatagtgtgagggcaccaggcgagttagcccccaatatcttttggggaggggtgtctttgggactgtgccaatctggctattcatccgtctctaccccaagtgcggcttctagggtcacctctgaggagagctgctgggatgctggggtagctgaggggaggttgtggggagtttgcagtgcatctaggaactagctcactgcaggtggggctgaagctggattcagtcatgggaggttccctgtgggctttcctttccaaagactaggcttgttttccctagaaactaaggtgctggggactgggtgacagccacctctcagcaggtgccgtgtaagtgtgaagatttgtgaagatctgtggcccttgcccaggggaggtagctggtgctagcaccagggtcacagaactaaggcctcctgaggaggcacacataccagcggggtcccaagctggtgctaattcctctcataggacccagtaagcccgggagcctgcagtcggctgtttctctgctgtggaataccctgttagaaagctgaggtcccctaaagagcctcctggaccgagtcacttttgtggccgggctgagtatggcagcaggtagaaagatccgcaggcataaagatccctgtggcttttggcaaatgactgaagtgtggatgcaggagcaatgagtggaggccaacatcaacagcatctaccctccccaatagtgtctctgttctgggggtgctgtggtcctcacttgctggcttaggattggagttaggctgagccactttgaaggagtgtgtttacaggaagatacaaattgttggtttctctattctttactgtacagtgtgtccagagagtagaagaaaattcctgggcctgtctggttggtgcagagcttttatggcactacaaggtcttcaggaactgtcactgtaagagccctggctgtgagctggggctacgtgaccactgcagctgagtttccaagcaggcctgtgtttggatctgagtttgacgcttggcggctcccagggcttgggatgagtggcagtgctgacttgttcacttggcagagccaccctgtgaggaggtggacttagtggccctttccaattgatcctgtcccatccaggcagtatcagcactaggagcagtgctgggtcagaagtccgaaggaaaggactcggttgatcggggtcattgtgagcttgtgtatgtttgtgtagagaaagctgaactttgggaggaaaggccttgtccttgcaggcttccaagacaccgctaaggttagcctttggttggagacaagtctctagcccagacactggagtaggcgctgagaccaagaggcaggccaagatggagatctatggaaggccctttgctggtagggattcaaagcttctccaggggaccccagaactctattaactggctcccctaccgggacaagcttcgtttgtgggctcatagagtggccatagagtgggtttaacccagcaccaagcctgagggcatgagcagtggtctaaagtctcacatagtcccattttacagactaatttgattgcccggccgtagaattctacagaaacaacaatcactgaaattccttagaatacgcagagggaggaggtgactcaacacggtgctaaacacattttattaaaaatatatattgttaaattaagtctgctgtctggacaatgatgttctgttttgttttcttgtagtggagtttaaaagagactattattttactctgatatattattattaaaaaggcattttaactttgtacttgaaaactaagtgagcgatttcacgtgttttagctgagacatcgaagtagcgggtgcttacttgtgggaaatcatgtattcatactacaacataaactccgtagctgatttggtaataacttttactgttacagacgaattcgctttgaccccggtggcagagcgctttgactccacattccacgcagctaagtgcaggaccttccagaaccttccccggtcccccctggtcctctttcggttcctcttcctagctctctcttttcctaattcttttttttaagaattgtcgtttgtttttcctggtcccggcttccttctaccactgtattttttgttagggttgcttctctatttattgacagtaataatgtacatttcacagtctggttttgggacagccaggaggggtgtggggggctgcatacagcttgctgcactctccggtgtcctgttgtatctctgtgtacgtgatgcttgtgacatagctgttgaagaaatattaaaaggtcaatgcgtacagcaggtgtagagagtccgtcagttccgcttcatcactttttttttttttttttgtgcccagaagaatataataaagctcctttctaatgtacttgtgctggagaacacttgaataaatggactgtttttgtgcaaaaagaaaaacggaaaaaaaaaaaaaagcaccgtcataatgtccttttgtcctgcgactcctttcccctgatgtggccactcacagtcctccagtgggctgaagtgggtgcagtttacgttgggagggtctgggaaatggatttctaaagtatctctcatatgggtgttaactaggggttgggacccaagggcagagggagtttggttcaagatcaaaaacaggttagactaaggtgaagttgtctcgtttacttcccaaaccagcagattctcgagaccagagcaggcaacagactggcatcctggttagctggcagtaggaccagcagggacttatggatgccagagtccagaaggaagaagtcagcaaaggagagaggcagctggggctgggggaatcctggaagaaccttgcgtttaaaggagatatttgcaaacacttgacaggtgacccaagggctgggatcagtggccaatagggctactgctggtctgagcataggctgcctggcagggccttgcagcctgaggagttgtccaccgtgtctctgccatacctatctagaagggccgtctgtatgcggggtctgtctgtcctgcatatctccgggagtagccagcaggcttggctggggttccactcctaaggactgtccacccgtttcttccagcaaactttctggacggttggatagggagagaccgtgtggcggtccttgagcagactgggaaagtttggctaaacaggttttctcatgggcactttttcttgctttttctttgacaaggttgtaaatgtgtatttggcttttactctactttttttcttgatgtttttcaatgttgatgtggaatcttactttcaaatggctgcatggcattttcttgttgaatgtttgtttatatatattttattttcgctataaatagagcttcaataaacatctttatgttttggcttcccccttttttgtatttttttcccttgaaatagattcccagaaatgagaccagttggagaaagtcacagtggacagtttggtttcttcctgattccttcaaagagatcagcaggcaagcttcgggtttcagctcagagtttctgtctgggcccttagtgagcagttcccaccttgtctcagcctgttctctacagcatctcaagttccctggggcttcgttaacttagaaaggaagccacccacttagctcactgttctgaaagctgggtccagcatccagggcctcatgctgtcaggcacaggcacaagaaagaattcagacccacctcatacagaaccctgccctcaaaggccctcttctccaatctactgcagaggaatacagagaagacaagccacacagaacctgtagcacacatgttaatcccagtgggaaagtgtgcgtacctttaaattaggacacagcacattcatgtctggaactcagacagcattcccttgggtgtgataaagcaacttcacctgtctctacccatgagacttcagtctcttgctgtctccccaggccccccagtcctcagtgccagggttataggtgcacaaccacacctggcttttgatacaggtccttgggattgaactcaggtctttatacttaacacagcaagcaggcttttccactgagccgtctccccagcccaagggcgctgtttattttttgagaagctagacactaaggaaaagcaggggcgttttgcaagtcctctttgctggaagaatacagacagggatgatccagcctccgtcttccaagactgtccccaaggttcaggaaggatgggaagacatgaagaggtgggggagagattggtatagacactcttggttctgaaagccattcctaaatatttaagggccatccaagccagggttgggagagcttactcaagtcaaggagctgcctgccatttgattaataaaaacctattggttcttggtgtcacttggtaatatagggtttgggggagcaaagacggggtgggggtggagagagccagggctgacagagtcaaacaagagtttggtggaagcaagatagacagttgagtggcaacccccatagtgaggtggcatgtggtatatgcacacagtctgctacctgggctgtaccttcaggttctgtgaggctgacagataggacagaagaggtgaaacaaggggctgaccaagagggtggctaagtacacacagcagagctggcatgggctctggtataacctctgggtatgtgcatgttggacctggggctgcagtgaggtaagacaatggctgttatggacgagcacaagtcaccaggcatcacccacaatgatccattttgccttggcttcagggcgcaatgaaaggataaatcttacccctcagtggcctcttgactgggactctgacaggggactgctggcttgggaggaaggtcagcgtggggagctataggtgtaccaatcttggcccctctgttgccctatccctttcttagctccctcatttttgaccctggtctcccagcctcaggttcaacttgtagcccctatcggttccacactggctccttgccaggttccagtgacctctgcctgctcacagtggatcacagggtcagcctggttcagtaagctgtgacagaggtatatgtgagcatgcatgtggctcttgcaattcagacacctttcttttccaggggtagctgggtcttcttctcagaagggttggcttggtcccccaggaaaggccattgagaaccatccaacgtgggctctctggtgagctgtaacctgggcaacagtataccatagatagatagataggtaggtaggtagatagatagatagatagatagatagatagatagatagattagatagattagatagatagatagatagatagatagatagatagatagatagatagacagatagatagaacacacacacacaacccaaacaaacaaaacccaaccctaatccccaaggaaataaaccattgagacacagaggaagagagctgaaaatcaaatctctcaggcccactatctccctctatatgcaaccatgctcattaaaagacagtttcttagggcctgtgaaatgtctctgtgggtaaaggtacttgctgccaagcctggtggcactaggtcaccagaagtcacatggtgcaaatggagaataacttctgcaagggtcctctgacctccaaatgtcttcagtggcctgtgtgtatccatgtgtgcatgtacacacaaacacacgataaatgataaaaagttatatagaatcacactgaaaaagttatatagaatgtcagggtaacccagcctttcctgcacagactggctttcctcgcggccaccaaaagtacatgaatgggattgagaacatctgaaaggagtgagctaaggctgtagctgtgatatatcaacttttatgcagatgtttccagagaggtgcactggaggtggagacgtgaggacccatagttcaggccctgtgtagtttgagaccacactgggttacactggacccacactggtgagaccttgtcacaaaaatccccccccagaggacaaaacaacaataacaacagaaaccataaataccctttcctagtaaaagaaaaggcaaggctgggctggagagatggctcagcggataagagcactgactgctcttccagaggttctgagttcaattcccagaaaccacatagtggctcacaaccatctggaatgggatccgatgccttcttctggtgtgacagtgtactcacatacattaaataaataaatgttttaaaaaaagaaaagaaaaaaggcaaggctgagaagatcacacacacacacacacacacacacacacacacacaccattttaaaaggggaggaaactgctgttttctgcaggagcactggccaactttgtactattacttaaagcattcgccaggttagactacagccatggacggtccttctgcgctgcacaacaacttgatcagttaaccgttccggcctctaggcatccagcagggactctaagggctaagggcgcatgctcactccacatgtgttcctgggagcgtttgttttagggtaaatgcccggatgtcgagttgctgggcatagttttgggcctttgcgcattttagattctgcattttcagctgatgtcagggtaaccctgcctttcctgcacggactggctttcctcgcagccaccaaaagttccctgccagactcttagcatacacttctgtgtggaagaacactaaagacccacctgttcctacccacacagtgtcacgcctgaaatgtgagaggcagaatgacaggcagcccagagcacttggaggagctgtcacggttgtcaccctcttctggaatctcctgggacacgcctggtgagaatagagcctctggcttctcccttgcaaagtcacgtggcagggacaggcagggacctacagagcaaggcagtgctctgtgcccctgcagcgaaccgggagcacataagatgcacaggaaggtttgaatgagaggccctggggacaagccgggcttcctgctgttaaggttggctggctggtgatggagagtcttgagcctccgtggcctctgaggctgagctctgcaagtttagaggagaataagggaaggggaggggacggcacaatagcaccaacccaggaccagctggagaaaccacaccacgtggtcccacttggccttagtttacgttttcattttataatcattaaattttccatttcaactttatttaaaaaatattaatacctctgggtggtggtggtgcacgcctttaatcccagcacttgggaggcagaggcaggcggatttctgagttcgaggccagcctggtctacagagtgagttccaggacagccagggctacacagagaaacgctgtctcaaaaaaccaaaataaataaataaaaataataataccaatcttttagctactaacttatttttattaatttaatgcttaattttaatgttttatagtttgcttttgtttttgcttagtaagacaggatctctgagttgttatgtaatgcaaaataacctgaattgctgattctctgcctctgcttccttagcgagggatgcaggcctgaagtgcaccattctttacacagtgcccatagaaactagggctaagcactctacccaaggatccacagcctgtttacctcaccttccattactttatcacttgtgtaatttatttgtgtgtacactgggtatgcacacatgctctagagtggcacgtgggtaggaggaggtcagaggacagtttgacaacttgcaggagtcagttaactctttccattacatgggtcctggagactaaactcaggtcatcagatttaagacaagcaccgtctcctgatgagccttagcctcagacttcattttgaaaactggctgacctgctctgaactcacacaaagagtgtgccagggcgtcatgcccatccttgattaatctctagtagctcgaggtgtttgtttcttttgagacaggctctcattatataggccgggttgtcctaggagctcactatgtagactcagatctgcctgcctctgcctcctgagtgttggactcaactgactttgcttttataaaggcaaaagtctgtttgtgtgtgcgtgtgtgcatgctcacaagcatgtgcatgtgcttgtgagaaattgaaagcaaagaggcaggatctctgtctctgtctctgtctctctctgtgtgtctctgtctctgtctctctttgctaggctggaagacagcaagacccagcaatcctcttgtctctgagctagggttactgggttactggttactctctatctccatcgtgaactctagacccacccatctccatctcccaagtgtggagattatgtgctgctctacctggattctgggagatcttaaacaccgtagcagcaaccacaacacattctgctaacactgagagtggggctggaaaaggtgcttgtcaccacggctgacaacctgaatgcagtccctgaacccacatggttggagaaaactgactcctgggaggtggactctgccctctgtgtacatgccctggctgggaggtggcctctgccctctgcgtacatgccctggctgggaggtggcctctgctctctgtgtacatgccctggctcaggtgttgttccctttctcatatacagacactaggttgtttttagttttccagacagggtcttactgcatagccctggctgatcactatgtagaacatgctggcttagaattcctagcacaggccccatcccacctggttcaataaggaaaggcacgggacatggaggctcacagacatctggttttttgtttgtttgtttgttttggttttgttttgtttttgtttttcgagacagggtttctctgtgtagccctggctgtcctggaactcactctgtagaccaggctgacctcgaactcagaaatccgcctgcctttgcttcccaagtcctgggattaaaggcgtgcgtcacagacagaaaggcacgggacatgctggctcacagacatctgtaactttaatccttcttttggcctctttggggtgccaggcatgcatgcagtaaacttacatatgtaaggaatattaaatatgaatcttttctatcaactaccgtaacacttgtgtttaggactggaaatccaatctttttatctcccccaccttgtgtcttttcatgcaaatattttaccaataccagcagcaaaacccttgtttgcataaggggccactgctgcatttcaagaatctgatggccctggtagtggcccctccccccaccccttcctttcctgtgcctcaggattttaggattagccagccaataaaactgtagggtcagaccccagacaaagggggagactcagtcacctcctgagttagaatagaacgtgctcttcctgtctccgtgtctgcttttctgagcatcctggctgtcctggaactctcttagggcacagagctccatgtgcctctgcatccaagggttggaactaaaggcgtgcgctgccactcccgggtttaagcacatcctcttgatcaagagtaaactttgccctgtctagatactttgcttgaagtggtgatctctccgtgatcgtaacacatgtattatttctaacacacacatgcaggtgaaatactcagacacatgaaataaaaaaatctcttaggttggaaagatgtggggagctggagagactcagtggttaggaatacctgtttgttgttcttttaaaggacccgagttcaaatcccagtgcctgagctggccatcttacaagcacatgtaactccagctctaggggactcaataccttcttctaaccttcatgaacacacactcaaattcaagttaaaaaaaagaagaagaaaaaaaaagaagaagaagaaa

SEQ ID NO: 276 - DNA, 6157 bp, Mus musculus
cccacaggcagagccgcctgaagcccagcgctgaggctgcacttttccgagggcttgacatcagggtctatgtttaagtcttagctcttgcttacaaagaccacggcaattccttctctgaagccctcgcagccccacagcgccctcgcagccccagcctgccgcctactgcccagcaatgccctccagcggccccggggacaccagcagctcctctctggagcgggaggatgatcgaaaggaaggagaggaacaggaggagaaccgtggcaaggaagagcgccaggagcccagcgccacggcccggaaggtggggaggcctggccggaagcgcaagcacccaccggtggaaagcagtgacacccccaaggacccagcagtgaccaccaagtctcagcccatggcccaggactctggcccctcagatctgctacccaatggagacttggagaagcggagtgaaccccaacctgaggaggggagcccagctgcagggcagaagggtggggccccagctgaaggagagggaactgagaccccaccagaagcctccagagctgtggagaatggctgctgtgtgaccaaggaaggccgtggagcctctgcaggagagggcaaagaacagaagcagaccaacatcgaatccatgaaaatggaggcaagtgttttcctcacccacaggggccctggctcccggggccgactgcgaggtggcttgggctgggagtccagcctccgtcagcgacccatgccaagactcaccttccaggcaggggacccctactacatcagcaaacggaaacgggatgagtggctggcacgttggaaaagggaggctgagaagaaagccaaggtaattgcagtaatgaatgctgtggaagagaaccaggcctctggagagtctcagaaggtggaggaggccagccctcctgctgtgcagcagcccacggaccctgcttctccgactgtggccaccacccctgagccagtaggaggggatgctggggacaagaatgctaccaaagcagccgacgatgagcctgagtatgaggatggccggggctttggcattggagagctggtgtgggggaaacttcggggcttctcctggtggccaggccgaattgtgtcttggtggatgacaggccggagccgagcagctgaaggcactcgctgggtcatgtggttcggagatggcaagttctcagtggtgtgtgtggagaagctcatgccgctgagctccttctgcagtgcattccaccaggccacctacaacaagcagcccatgtaccgcaaagccatctacgaagtcctccaggtggccagcagccgtgccgggaagctgtttccagcttgccatgacagtgatgaaagtgacagtggcaaggctgtggaagtgcagaacaagcagatgattgaatgggccctcggtggcttccagccctcgggtcctaagggcctggagccaccagaagaagagaagaatccttacaaggaagtttacaccgacatgtgggtggagcctgaagcagctgcttacgccccacccccaccagccaagaaacccagaaagagcacaacagagaaacctaaggtcaaggagatcattgatgagcgcacaagggagcggctggtgtatgaggtgcgccagaagtgcagaaacatcgaggacatttgtatctcatgtgggagcctcaatgtcaccctggagcacccactcttcattggaggcatgtgccagaactgtaagaactgcttcttggagtgtgcttaccagtatgacgacgatgggtaccagtcctattgcaccatctgctgtggggggcgtgaagtgctcatgtgtgggaacaacaactgctgcaggtgcttttgtgtcgagtgtgtggatctcttggtggggccaggagctgctcaggcagccattaaggaagacccctggaactgctacatgtgcgggcataagggcacctatgggctgctgcgaagacgggaagactggccttctcgactccagatgttctttgccaataaccatgaccaggaatttgaccccccaaaggtttacccacctgtgccagctgagaagaggaagcccatccgcgtgctgtctctctttgatgggattgctacagggctcctggtgctgaaggacctgggcatccaagtggaccgctacattgcctccgaggtgtgtgaggactccatcacggtgggcatggtgcggcaccagggaaagatcatgtacgtcggggacgtccgcagcgtcacacagaagcatatccaggagtggggcccattcgacctggtgattggaggcagtccctgcaatgacctctccattgtcaaccctgcccgcaagggactttatgagggtactggccgcctcttctttgagttctaccgcctcctgcatgatgcgcggcccaaggagggagatgatcgccccttcttctggctctttgagaatgtggtggccatgggcgttagtgacaagagggacatctcgcgatttcttgagtctaaccccgtgatgattgacgccaaagaagtgtctgctgcacacagggcccgttacttctggggtaaccttcctggcatgaacaggcctttggcatccactgtgaatgataagctggagctgcaagagtgtctggagcacggcagaatagccaagttcagcaaagtgaggaccattaccaccaggtcaaactctataaagcagggcaaagaccagcatttccccgtcttcatgaacgagaaggaggacatcctgtggtgcactgaaatggaaagggtgtttggcttccccgtccactacacagacgtctccaacatgagccgcttggcgaggcagagactgctgggccgatcgtggagcgtgccggtcatccgccacctcttcgctccgctgaaggaatattttgcttgtgtgtaagggacatgggggcaaactgaagtagtgatgataaaaaagttaaacaaacaaacaaacaaaaaacaaaacaaaacaataaaacaccaagaacgagaggacggagaaaagttcagcacccagaagagaaaaaggaatttaaagcaaaccacagaggaggaaaacgccggagggcttggccttgcaaaagggttggacatcatctcctgagttttcaatgttaaccttcagtcctatctaaaaagcaaaataggcccctccccttcttcccctccggtcctaggaggcgaactttttgttttctactctttttcagaggggttttctgtttgtttgggtttttgtttcttgctgtgactgaaacaagagagttattgcagcaaaatcagtaacaacaaaaagtagaaatgccttggagaggaaagggagagagggaaaattctataaaaacttaaaatattggtttttttttttttccttttctatatatctctttggttgtctctagcctgatcagataggagcacaaacaggaagagaatagagaccctcggaggcagagtctcctctcccaccccccgagcagtctcaacagcaccattcctggtcatgcaaaacagaacccaactagcagcagggcgctgagagaacaccacaccagacacttttctacagtatttcaggtgcctaccacacaggaaaccttgaagaaaaccagtttctagaagccgctgttacctcttgtttacagtttatatatatatgatagatatgagatatatatatataaaaggtactgttaactactgtacatcccgacttcataatggtgctttcaaaacagcgagatgagcaaagacatcagcttccgcctggccctctgtgcaaagggtttcagcccaggatggggagaggggagcagctggagggggttttaacaaactgaaggatgacccatatcaccccccacccctgccccatgcctagcttcacctgccaaaaaggggctcagctgaggtggtcggaccctggggaagctgagtgtggaatttatccagactcgcgtgcaataaccttagaatatgaatctaaaatgactgcctcagaaaaatggcttgagaaaacattgtccctgattttgaattcgtcagccacgttgaaggccccttgtgggatcagaaatattccagagtgagggaaagtgacccgccattaaccccacctggagcaaataaaaaaacatacaaaatgtactggtgctttctgtctaagttgccttttgtgtgttcttttataaggccccaccatcccctctgcacatggcagctccggtcctggaatgtgatgtttttggtcatctctaaagactgcagtttcatacttgggaggctgatgacacctttattataattattcttatggttctggctataattgttttaagattttctttcagaaaacaaaaacccaacacccttccctttaggtttcaaaccaaggtgcgggggggtggcaggtgcttttttaaggaccagtggctctggtgccctggctcccacccctcaggccaggtgagccactgggcaacaagctaggcagccagggagtttgaggcccaccctccgggccagtcactcttctcttcttcttcccttcctcgtgagtccggtgtgtcagggctggagggaggccggggcagcctccctccttgtgtgtgtggttggagtggcgtgtgtttcttttctagtgtttgctctgatggctgtgctctcacttgagtcagcttcacctgggccatgtgctcgcactttgttccgctccccagccagggcaggcagcctggcattggcagcgggaagggaaggtgtgcttggccccagggtgagggcttgcctggatggatggagtgtagatatgtggcatatagagatatatattttataatgggaggggggacggcacctcctgggaccagcagagactgggaggtgtgctgtcaagcacatggtcccaagaccgcatccctagaaagatggggcctatgataggccctatataaatacatagatagggtcatgtataagaaatatacacagagggggttggagggagtgggctctgtgttgagcctgggtccttcccgcagacagccccacaaacagtatatcagtctaacacatgcacaggaatctatttctgtctggatgcacaccagggagcccccagcacacttctctgcaggatcaggacgatggagtcggctacacagctctctctcgtacatctgttgccctgatgacaggtagactcgatcccagaagttgctaggtgctgaagtcaggaaaaggaggaggtttgatccaagcaggtgcttcctctagcaggtctgtgttgtattccctttgcctctggtgatgtcagcttctgttagcagcctgtggttactgacctgcaactctcggcaccagtcaagtcagccctcagcccctacctattctccccaaccaaagtcgaactgaaatctctcttggccatggggcttccattgggaaaataaaatgttaaaaaaaaaattaaaatgggacagtgaacctcacttttggagtaaagcaaatcagtaattagtgctaaaactagtcagaggctttggccccttgctcactgctcgggactaagcttggctggtggcttggtacactgcttgggctgtgtagtcctgcccacctctgctcattttctctggatagagttttaagatcgcagctagtttcccctgccatggcaggtatgactatggggctggagcatccaggagagggggatgcttgccctcttggagtccctgtactaaatgtaacgtcctcccttgctccagcagggctccattctgacctggagtccaccagcaccatgcaggaggactggaggggaggaaggctgctttaggcagtccaaggtgctccctccccctctagcaatggcaaggtcttcccagctcctgtcaggactgtcttcaaaggccatctctgcccaccgcatatgtgacgaagctagcctttcccaggagcctagtgccgcctcagctgggcctggtgctcccgtgcctggggttagtgtgagggctcaggaggaggagttcccaagggactgagtagaggcttccaggtggctgaccagtactgacctgacacggtccctgatggactcctcatggggcgggcatcg

SEQ ID NO: 277 - protein, 929 aa, Mus musculus
SPRSPTAPSQPQPAAYCPAMPSSGPGDTSSSSLEREDDRKEGEEQEENRGKEERQEPSATARKVGRPGRKRKHPPVESSDTPKDPAVTTKSQPMAQDSGPSDLLPNGDLEKRSEPQPEEGSPAAGQKGGAPAEGEGTETPPEASRAVENGCCVTKEGRGASAGEGKEQKQTNIESMKMEASVFLTGPGSRGRLRGGLGWESSLRQRPMPRLTFQAGDPYYISKRKRDEWLARWKREAEKKAKVIAVMNAVEENQASGESQKVEEDPAVQQPTDPDTVATTPEPVGGDAGDKNATKAADDEPEYEDGRGFGIGELVWGKLRGFSWWPGRIVSWWMTGRSRAAEGTRWVMWFGDGKFSVVCVEKLMPLSSFCSAFHQATYNKQPMYRKAIYEVLQVASSRAGKLFPACHDSDESDSGKAVEVQNKQMIEWALGGFQPSGPKGLEPPEEEKNPYKEVYTDMWVEPEAAAYAPPPPAKKPRKSTTEKPKVKEIIDERTRERLVYEVRQKCRNIEDICISCGSLNVTLEHPLFIGGMCQNCKNCFLECAYQYDDDGYQSYCTICCGGREVLMCGNNNCCRCFCVECVDLLVGPGAAQAAIKEDPWNCYMCGHKGTYGLLRRREDWPSRLQMFFANNHDQEFDPPKVYPPVPAEKRKPIRVLSLFDGIATGLLVLKDLGIQVDRYIASEVCEDSITVGMVRHQGKIMYVGDVRSVTQKHIQEWGPFDLVIGGSPCNDLSIVNPARKGEGTGRLFFEFYRLLHDARPKEGDDRPFFWLFENVVAMGVSDKRDISRFLESNPVMIDAKEVSAAHRARYFWGNLPGMNRPLASTVNDKLELQECLEHGRIAKFSKVRTITTRSNSIKQGKDQHFPVFMNEKEDILWCTEMERVFGFPVHYTDVSNMSRLARQRLLGRSWSVPVIRHLFAPLKEYFACV

SEQ ID NO: 278 - DNA, 127722 bp, Homo sapiens
  misc_feature (1)...(127722): n = A,T,C or G
tttttgagacagggtctcactctgttgcccagactggagtgtagtggtgtgatcttggctcactgcaacatccgcctaccaggttcaagtgattctcctgcctcagcctccagagtacctgggattacagaaatgcgccaccatgcacagctaatttttatatttttagtagagatggggtttcaccatggtggccaggctggtctcgaactcctgacctcaggtgatccacccgtctcggcctcccaaagtgctgggattacaggcatgagccaccgcgcccagcctcaggatgttggttttcataaccacaggatagagacatcaaaatcaggaaagcaacattgatacattactactatctaatcctcagaccccattcagttttctccggttgttccaataatgtcctttatagcaaataaaatccagttcagaattgcacatttagttttcctatgtctttagtttccatcaatacgtaacggtttctcaacctttctttgactttcatgatcttgacactttcaaaaaatgcaagccagttaatttgtaaaacagctctcattttgggttcgtctggtgtctcctcaaggtcagattcaggcatgcacctttggcaggaacatcacagaaatgatgccgtgtccttctgactgcatcttggtaggtggtgcaccatttggatttgcccaattactgacaacattaacttttctttcaatcacttgattaaagtgatgtgttccagccttttccattgtaaagttactctttgtcgctttgtaattaataagtattttgtggggaagtactttgagaccatgtaaacatcccattcctcactaaacttgctgtttattatctagttatttctgtcagtgtggactatgggttataatctattaatatctgtcttagtccatttgcattgctagaaaggaatacctgagactgagtaatttataaagaaaagaagctgattttgctcacggttctgcaggctgtacaagaagcatgtggctaggcacggtggctcatgcctgtaatcccagcactttgggaggccgaggtgggtggatcaccggaggtcaggagttcaagaccagcctggccaacatggtgaaaccccgtctccactaaaaatacaaaaattagccaggcataatgacacatgcctataatcccagctactcaggaggctgaggtgggagaatcgcttgaacccaggaggttgaggttgcagtgagctgagatcgcaccactgcactccagcctgggcaacacagagagactccattaaaaaaaagaagaagaaggaagaagaagaagaaggaagaagaaagaagaagaagaatggcactggcatctgtttctggtgaggccctcaggaaacttccactcgtggcggaaggggaagaaaagcaggcatgtcacatgatgagacaggaaggaagacagagacgaggaagtgccaggctctctttaataatcagctctcaagcgaagtaacagagtaggaactcactcattaccttgaggggggcatcaagctgttcatgagggatctgtccccatgacccaagcacctcccactaggccctgcctccaacactggggatcagatctcaacatgagattgggaggggaaaaatagccaaactatctgaatatcattatttattttggtgctcaaattgtcccatattccaccagtggcagccccttttgggacaagggacaagtctgcttgtcccttgctcgacccaattctggaatctgctatttctccaggcaggtccagtgccttccagtaaagactggtatttagaaaccaagttctggacactagttttatttatggctattgaggttttattgtgtctaggtgctctcaggtgacagaacaagtgaatgtatatatttctgaggtgtctcctgggggaaggggttaagttagcatctagaagttgggggacattagtagaagttgctgtgagaaatccgataagagagtaaacatagttgaataaaatacggtgaacgggcacatataaaaccatacagagtgaactcgtatctaggattttctcagtgaatgaggataacggcattttatgggtttacaaagcactttagtatccacttgatttgatgttcgcaatgtctacggggcgcatgcgcaatgatctactcagcagctttgggtctttggggggctggctgcttgtccacagcattcccaggaagtgagctggctggcagctgcctgaggttgtaaggaagtgacattgcattccccaaacctagggattgcccaacctctgaaggaatccccaggaaaacatgatcaggccaagaggaagcttgtcctcctcaaaaacgacttcttcccctcagccctcaggagcagccacggaccacaatgaaccagggaaattctcccagggagtcaggccaggacctggctccactgccaagatgtgagccctggctgggtgtcatgtaggccacggacgggtagcccctgcatatctttcccttctagcttcttctaaagccagtcttcattgtggatcatctattttctctccaccactgtatgtatggtgctttggggtggttgagtttacaatttaaccacagggtacaggataagaagaagccacactgagaccccatggagaggcatgcacattactcagagatcttggtcttagagctggccacgacttggattatctttttcgcaaaaagagagtaaatgcatttttagttgtggatggggtgggttctttacatgagcaggagcatttttaacaatatattttctattgagatgaaattcatataatattaaattaaccactttaaattgtacaattccacggcatttagtgcattcacagtgctgtgcagtcagtcaccagctctgtcaagtgcaggagcacttttgaaagttcacccatgggcagggtgccggggctcacgcctgtaatcccagcactttgggaagccgaggcgggcagatcacaaggtcaaaagatcgagaacagcctggccaacatggtgaaaccccgtctctactaaaaatacaaaaattagctggttgtggctgcgggcgcctgtaatcccagctactcaggaggctgaggcaggagaatcgcctgaacttgggaggcggaggttgcagtgagccgagatcatgccactgcactctggcctggcgacagagtgagactccgtctcaaaaaaaaaaaaaagaaaaaagaaaaagagaaaaagaaagggcatccatggtggggaaaggtacgcaaggatgctgcgtggccattgggtggcgtgtggtgtgtttgcccagcacccttgctttggtgaacagctttgccctgcttcacagggtgctggcaggatctgttcatcccagtgccacctcttgaacccacttacaggagtgggcatgtaatctgtgctatcccactggccacagaacctggttcaggttggacttgtgaccaacgccagaacaactgaagtagtccctggaacttttctgctagggatggccccttgagagagggtgacattgaagaaaaacaaaaacagaaacaaaaaccagggcaattgtgtgtctgaggatcagggttgggagtgaggggttgttaaaagacccagagctttatgttgtggaggcattaggggatttcctgaagtcctccttcctttcttgaaggaaaagaaaatgatattcttccactgggattctaagctggaagcatgtgagcctgaggctgctggtcaccatcttccaaggctgtgtggagtttgtttaaagtaggagggaaagatgccaaaatagtgggaagcagtcgtgagcgatggaaacaggggaagaaagagagagagcagggagagagtgcactctggagctggcatttgaactaggttttcctagtcctaaatccccaactctgggcttcacaattgtctcaattctaaacaacagaatccctctgttcagactaattcaggctggcattctgttactgtaacagagagaatcttgactaatgtgacagccctacctggaaggcgggtagaaggatccccatgtgttacagatgaagaacctacggtgatgaggtccaggacatagttctcctcgtaggtgtcacatggaggggatattaagatgactgcagtggtgagtcactgtgggggtggaagtcgctgagcagctggtaggtgagccaggtctggaagtcaggagggaggatggaaggtcacccactgtgccaaaggcagatgggatggtttgagaagagcatggatggagaagacacgtctctgtcaggatgttgggggcaagggtagacctactgccacttttctcttttgagtcaggagtgtaggagctaagccttccgctggagaccctgggtagaggatgttagaggagcatgtgacctgtgagggggctgggagggcccctgtggtagtcactggtgctaactctatctagttctccccactttgaggcccatggtagcatttacttcctggtccttgtaagtgaatggagctgtgtgactgcctatagtgacaagtgccttttgtcaatgggacaccctctggtactctccttgagatagtggcttttctgtcgaccagggtccctgagtattcaatgagcagagccccctacctctacccctctgcaaacctgcgatagacatgtgacacgggcaagagaaggaactttcgcggttcgttggtaatctactgaagaaatgtaatgtacagttggactatgctctattttttttattgtggtaaaatagacataacatgaaatttatcattttaacctttttttttttgagacggagtctcactctgttgcccaggctggagtgcagtggcgcaatctcggctcactgcaagctccacctcctgggttcaagtgattctcctgcttcagcctccccagtagctgggactacaggcgcctgcctccatgcccagctaatttttgtatttttagtagagatggggtttcaccatgttggccaggatggtctccatctcttgaccttgtgatccacctgccttggcctcccaaagtgctgggattacaggtgtgagccaccgcgcccggccttttttttttttttttgaaatggagtttcactcttgttgcccaggctgccgtgcagtggcatgatctcggctcactaaaatgttcgcctcctgggttcaagcgattttcctgcctcagcctcctgagtagctaggattacaggggccttccaccacacctggctaatttttgtatttttagtagagacggggtttcaccaggttggccaggctggtcttgaactcctgacctcaggtgatccacctgactcagcctcccaaagtgctggaattaaaggtgtgagccatcacacccggaccttttaatctttttttttgagacagagtctcgctctgtcgcccaggctggagtgcagtggcatgatctcggctcactgcaacctctgcctcccaggttcaggcgattctcctgcctcagcctcccaagtagctgggactacaggcgcccgccaccacgcccggctttttttttgtatttttagtagagacggggtttcaccgtgttagccaggatggtctcgatctcctgacctcgtgatccatctgccttggcctcccaaagtgttaggattacaggagtgagccactgcgcccggcctaatcatttttaagtgtatagttcagtgtcataagtacaaccaccaccgccatccatctccagaactttttcatcttcccaaactgaaactctatccccgttaaataccaagtccccattccccctccccgcagcccctggcacccaccattccacttctgtctctatgagtctgactactccaggaccctcatatgagtggaatcctacagtatttatgcatttgtgtctgcctcatttcatttagcatagtatcctcaaggttcatgcatgttgttaacaggtgtcaggactccctcctttttaaggctggatcatcttctattgtgtggatagactgcattttgcttattcattcatcagctgataacatcaggttgcctccacttttggctattgtgaataatgctgctataaacattggtgtacagatatctactccaatctctgcttttggccgggcatggtggctcacgcctgtaatcccagcactttgggaggctgaggcaggtggatcacctgaggtcaggagttcaagaccagcctggccaccatggtgaaaccccgtctctactaaaaattaaaaaattagccaggcatggtggtgggcacctgtaatcccagctatttgggaggctgacacaggagaatcacttgaacccaggaggcacaggttgcagtgagccgagatcacgccactgcactctagcctggacaataagagggaaactccatctcaaaagcaaaacaaaagaaaacaacacaacaaaaaacaaacaaaaaaatttctgctttcaattattttgactgtacaccggaagtggaactgctgggttatatggtaattctatgtttaattttttttgaggtactaccatactgttttccatagaaactttgtggttttgagtcactgagatttggagttgtttgttactgcaggacaacctagcctgtcctgatactgccacataccctagataatctaggatcagccaggattctgatgaggccacagtgcggcagacacaagtgaggggtgtagaagccgagaggctaaaccaacctgagttaacccagtatgaggtgcagtgatgagggttagctagcacagatatgcctcctcttgggaccaaagacattaaggtcagggtctggaaccaaccctgtagccaaacggttgtttcttaacagacataaaccccctaacacagtcaccttggacctcttgaccccagcaacccatacatccaaggttacatactttaccatactaagtgactttggtggctcctaataatgtcatcataaatagccctattgaatagaaatttacatttgctcatcatggccctgagaatttcagcttttttttttttttttttttttgagacaaagtcttgctgtgttacccaggctggagtgcagtagcacgatatcagctcactgcaacttccgccacccaggttcaagcgattctcctgcctcagcctcccgagtaactgggtttacaagcatgcgccatgacacccagctaattttgtattttaagtagagacggggtttcaccatgttagccaggctggtcttgaactcctgacctcaagtgatcctcccgcctcggcctcccaaagtgctggggttacaggcgtgagccactgcacccactgaatttcagcttcttaagagcaactatgtttcaaaagtgtggtgtgggctgggcacgatggctcatgcctgtcatcccaacaccttgggagcctgagataggagcatcacctgagcccaggagttcaagaccagcctgatcaacatagagaggcccctatctctacaaataataataataaattagccaggcatggtggtgtgcatctatagtcccagatactcagaaggctgaggcaggaggattggttgagcccagaatgtcgaggctacagtgagccatgatcactccactgcactccagtctgggcaacagagcgagactgtgtctcaataaaagaaaaaaaaaaaagatgtgatgtggggtgatttcagagccggatgaacctggctttgaatcctgactctgccacttcccaactgtatggctttgactaagactgagcctcagtttcttcatctgtagcgtgaggagagtacaagccatatcacagggctagtgaagactagagaaaataccatgtctggtgcctggcacatagtagacactcagtaaacagtcgctgctgtttggggccgtgttatatgtaagcccttgatgaaggcagaggtatctcagtcatccttctataaacggtcttctcctttgccaagctgggtgcgccatttagagtgttcacggatgcccctcctgatgtagaaagcgaacagcccaggagggtcacatgttaattccaccaaggtttactgagaatctcctagcaccaagtgctgggctacagggatgacagacgcggcccctgtcctcacagagcactgggagtctctgggccggtggggaccatggacagcagggcctatcatcagtagggcggggtggccacttgagtgagggtgacactgaaaacggccagaactatggcctagaagctggtctcagatatcgaggctcagggtgggggttggggagacggagggacctggaagcattggagaacctcccgaaggaaaaccttcccgtctgtatgaaaggtcagctcccggtcccagagaacttggcaactcggttctgtgacgctaaaagggtggcgttgggggggcgggtgctgggctgcatggggagaagggaaaagtaggatccgcttcactgtgaagtgagtcccaccaccaactccagcaatccctgcccacaagtaggatggcgggtccctgggaagggagcacgccatgtcctgtgccagtcagggagctcagggcactgtgatatagctgaagtgctgagtagaattcggggtgcagagctgcgggtggctggtggggtgctggggcgcgcaaggaggctggaggcgggggtgggggggtgcccagccccaagtcctacagcggctgctggaggagtgagatgagcacacagtgagtggctgtgctggtggaattagacagaggtgccccaagtcaggaacctagagccctgagcgctccatggggaaggagaacagcccccacggtgaaggggtgagggcggtgtgtaggcacacacagaatcttccagctggaagagaccttcaatgtcatttcattcaacctcccacctcatgaaatctttcagtcttccagtgcccaactgaggacacccaactctacttggacacctcaaggtacggggaactcactcccttcaaggcagctcatctcagagaggctttggagcctgcgggacggccaggaggagcctggcgctccgaccttggccctgtagagcagagtggcctctactccgcggcggcacctggctgggggttgcggcgcggttgggccagcgctgctgtccccagccccagtgctgaggcaggcagagcgcagtgggctctggcggaggtcgggagaactgcagggcgaaggccgccgggggctccgcgggctgcggggggaggcacttgacaccggcccggggagaggaggggccgctgtccctgcggccagtgctggatgcggggacccagcgcagaagcagcgccaggtagcggggcgcccagcgtggggagggctgcggcgaggcccggagctcggctacgactcgaggggctactgtagtggccgggagcgcggccgaggcggggcgcccggggcccggcccccggtctgggcggtgcggggtccagacctccgccaagcggcgtgcggggaccccggcggggccgcagaggccgggaagtcgcgccgagggcgctaggaccggccgcgcgcccaggccgctcccgccgcggcgccccggggccccccagtcggcgctgcctcccgggccggctccgcagcgccggggccggggccagcgcggccgcggggggcgagcggcgggcggaggcctgggcccgcgggcggccggagggagggaaggaggaaggcggagagaaggggtgggagggggggacccggcggaggaggcggagagagggagcgcgacagcgagcggagggagggagcgagcgagcgaggcaggcaggcgggccgggagggagggagggcgcgcgggcggcggcggcggcgagagcagaggacgagccgggacgcggcgccgcggcaccagggcgcgcagccgggccggcccgaccccaccggccatacggtaatgagcgccgctgctggcggcccggaaggccggcccggaggcggcggggagccggggagccgggcgaggggcgccgcggctggcagtgcccggttcggggcacgctcccggacccctgaaactcggctcctggcgccnnnnnnnnnnnnnnnnnnnnnnnnnnnnnnnnnnnnnnnnnnnnnnnnnnnnnnnnnnnnnnnnnnnnnnnnnnnnnnnnnnnnnnnnnnnnnnnnnnnnnnnnnnnnnnnnnnnnnnnnnnnnnnnnnnnnnnnnnnnnnnnnnnnnnnnnnnnnnnnnnnnnnnnnnnnnnnnnnnnnnnnnnnnnnnnnnnnnnnnnnnnnnnnnnnnnnnnnnnnnnnnnnnnnnnnnnnnnnnnnnnnnnnnnnnnnnnnnnnnnnnnnnnnnnnnnnnnnnnnnnnnnnnnnnnnnnnnnnnnnnnnnnnnnnnnnnnnnnnnnnnnnnnnnnnnnnnnnnnnnnnnnnnnnnnnnnnnnnnnnnnnnnnnnnnnnnnnnnnnnnnnnnnnnnnnnnnnnnnnnnnnnnnnnnnnnnnnnnnnnnnnnnnnnnnnnnnnnnnnnnnnnnnnnnnnnnnnnnnnnnnnnnnnnnnnnnnnnnnnnnnnnnnnnnnnnnnnnnnnnnnnnnnnnnnnnnnnnnnnnnnnnnnnnnnnnnnnnnnnnnnnnnnnnnnnnnnnnnnnnnnnnnnnnnnnnnnnnnnnnnnnnnnnnnnnnnnnnnnnnnnnnnnnnnnnnnnnnnnnnnnnnnnnnnnnnnnnnnnnnnnnnnnnnnnnnnnnnnnnnnnnnnnnnnnnnnnnnnnnnnnnnnnnnnnnnnnnnnnnnnnnnnnnnnnnnnnnnnnnnnnnnnnnnnnnnnnnnnncgcccgccttgggggcacaccttcccccggagtgcccgcggcacggagaggggtggtcgtgcccggctcctccctgtccccaccgcgggccgtgggtgcccgggcggccgcggtggcggcgccgcaatgtgggggcggggcgggggcgggcgaggatcccgggcccgggcccgggccgcgggggccggaaaacgcgggggtggaagtagcggggccgggaccgggagcggcgcagggggggtacgcccggggtcgcccctccagcacccccgcgcacactcccacgcacgcggacacactcacgcacacgcaccccgccgggccggtgcagacgtgtccttgaaagcttcgcatctgcacagtgaaggacgaggcctcgccgcggctgcggagcggggtcttcggccccacgtccccgcaccccgggagacctcgagcttcggagccgcaggcggcggctgtccgtgtcccgccctcacccccagttcccctcccccaggccgccctgccttccctccccttcggcgcggaccgggctggcgcgggtccagggcccgcccctggcctcccccagcccctcatcgctggggcccgcggccctggggctgccaaactgcttttcgctttcctgaagcctcccttcttgggggcaccctctcccaccccagcgcccctctgccatttctccccctctcctcatcccctccgtcctggcaccctctctccgctgcacggccagttgaggaggtgttggcgccctgggcggggagcagtgccctctggttcccaggggctgcctcccccggctcctgaggggagccccctgcggctgcaccttgacccaacatggcgtctggcacccagcagggcagctctggcctgcggcaggcgggagggtgggcagggccgagccccagggccgcgcagctaccccccctccaaaccagcggggacagaagccttggggagaagcgctgtccgccctgtgacccaacttgcccctcactgccgtgcccagagactgccatcagcatccctgagggcctgctcagtcttcatgtttcaccctaggctgccagcggctgaaccgcctcctgggcgggcggctacgaagggatcctgggatcaggtgctgctccagtgtcgcctcctccctcgcgggcagatgtgacagctgcagccaggggagctattcgccttgctattgcctgggtgttaggactggcctgtgggatttggggggccaggcatcccggggaccctctttggttggctagcaggggccatctccaggtagttttctgagctgcctgcctttggagagttgggttgtagggagttcctgctgggtttctggggcaaaatggtccccctctgcctccaggttctaccgaggccctgcttgggctgtgacaggtggctctgtcaaggtgggagtctgtgtgtgcacatgtgctggctccaggcgagggaccaggctggcctgtgcagcagctctggcacctgcctgcctccctggtgggtccccctcctctgtgcagctcctccccagataagcagctgcggattcaggccgaccaaacttccctcgttaccccacccaggcaccagtgccttccataggagactgaccctaagaaaggtgaattccttctagactcaaggagtggactggtccacagggctgccctctgagtccttcctggagaagcctaggaaaggacgccagcagccatctgtcagggtgtctgcggacaggattcctctgtggggtgggggttggactagagccggaaggtccattccagctttgacattctatggctctgattctagtggtggaatttcaggcctagcaatggggacagggtggtctgtttttcggcacatggcagtaataggggaaggcttccaaggagaaggagatatgagagagatcagggcgcccagcgagttgggccttgggaaggagaggcagtgtgaggagggtccctgcaagagacgggttggtcacgtccgactctgcagagggtgtaaaaagtacagcctcctttaagcctcggcacgtgtgtatcctgtaggtttgtgtataaatccctgtgtgtggataatttctgaggtttccttttcaagtccaattcacagtaagctcctcagtcccttatggatgttttactatcgctttcacacccacctctgccagtggttctcaaaaagctaggaagacaggacaaacggtaaaatccttgtccagggtcaccggcaggaagaagtggagccaggcctgcactcgggggaagatgccccatgctatacctcttacctgggctgctgcatgtgtctgtccccgctctcagtttgtgatctccaggaaacaggggccttgcctccctgggtccccattggacaagcggtgaggcctccgagggtgtctgctgagcgaggggagcgcactgccctccagtcctctccccgaggcagcgaggcaggttagtgctgggctcccttccccctgctgctgtgcgccgctgcccagcggccactgcctacttacaggccagctcctcagggtcacacctccctgaaagacccaagttctttcccagcaagagccagactcccccaaggcttctctttttgggatccaggtagaaagaggactctaatgggtgagttaaaacagaccaccctctccccatctttgggcccgaaatgtcagcattagaacccaaaccttagaattgcagtctgaaagaggagtttaagctctgagagctcttagtgctgggtacgggactgtttgtgggaggtggtgcccagttcttcccagggttgtccatgctacccagagcctgaggcctggagggccattcacgtgccagtcacatgcctctccctgggtacttcctgctgcctccaacttgctggcctggggtcctggacttggtgctcgtatcctccccaccccgtgccccactgggagttgagtgtgtctctggcctccagcaggtagggccagagcatctaccccaatgccattccccatgctgcggccctcggggaatagcttctacttttgtttgaatattagtatgtgagcagagagcccgtcagaagcccacctggcctgaggctgggtttctgcagggactttgctgttcctgagcagggctttaatggtctactaaaggtgccagatccctttccactttaattttgagggctcattttcaatcatttctctctgacgatttttccctaagaacatgaccaaatctgagatccatgaagtgtcagcctgagatttatgtctgtatccgagcctgcctccacttggctaagtgtgtgggcaagacgaggttcagtgcacatgtgtctgtgcatgatgtgtgtgtacgtggtgtgccgccacctgtggatgggtaggacttgcttccacatgagccagtgtcaaggcagcttgaggccctcgagtcacagggagctgcactctgacacctcccagcggcaggaacttgggcaacaactcgattccctgggcctcagtttcctcacctgtaacatgggagtgtgcgtggattctgcttacaggtggttgtgaggatggagtgagatcatgtgcgttacagccttagaggagcgggagccctcctgttagctgtgtctgttttcatcatttgggtggctcacgtggactagcactgcaggaagtgctctaagaagcctcgtccaccttcctgtgtcttttgcagaatcttggtcagatgaggaaagtgccgattctgattaaaaatcctgggaggtgggaggcttctcagcgacacttagcaatctgttgagttgaacaaatctcgtgtcaacaggttgttttgcttccacctgaaatccctcccgctgtagtttcagctcgttattctcatcctgtcttgagtgcagcagcactttcccaccgtattcgcttccattttccagagatgtgctgagcatttcctgtaagccatgccctgtgctggctttgaggggacacggtgtgtttaggatgcgcccagctaacgaagaactgcagagtgggactggggtcactggagagggagaaataaagtgctcaaaggagagtgaggtcacaaccaactaaggtcatcagggaaggcttcttgaaggaggtggcatctcagaagcgccccagagcacagaagtggggcttcaggggcaggacatcattgtgggtggctgtagtgcccgggaggtggactggggcctgggttgtgctggaggccaggctgaggccctgccttggtttggggaggagatccctgcactccggaactcctctgtggcccacggaggatcgctctgaactgcctcagcgtggcggccagtgggggtaggggtggagagaggacagcagggagggaggggaaggggccaaatgagctcatttggtgtcggatcctgattctttctattccatagaccagagcttaagagctcagacttggagagcaacagaacagggtttaaattacactgaccccagggggttgtgacgattaagggggaggccagggtcaggtctggtctgcgagcgagtgatagcagtcatggttgaggatgtggcaggtggagaagggtcccttttctggcctcccagaggtctccatgtccccccttgcccactccatcaggctgaggcgccccagcatccagaacattcctgcaaggggctgccagtgccagggaaatgggggtgaagacgtcaggttcctgtctctgcagcctgaccctgtcccccaacacacacgctgggcagaaccgagccaccaacccagaggggaggtgccctgcagacggcccaggcccccaggcatgagtgcaggtgcctggcagccccctgcaagaacagctggtgggcagggccttctgggccaaatctcccttgctgatcacatcacaggccaccaacctgtctggaggacagcaagggtgcttggtgggcagtggaggtgggggtaagggaggtgcagacgcctggggctttcctagctaaatcccagtatggagtggtttgtttttttttttcagcagcagctctatgttgcctactcctgtcctactgtggtcctctctgacccttaaaggctgcccagccttatttagatatatgaccaggttcctattttctctttcctgtggtcacggccctgctcaccaccatccctattgatctttcctctctgcttctgtttcaaatgtcaaggtcatttttaattctgagccagttattagctgccccgtctgagtgcacagaggggacggaggaccatctcttatagccagtaaccggagagctggaacttgggtctcctgactcctagtctaatgctcttcttactataatgaaaggggaggggggctcagtgcagatgttcgagatctgatagatcagctgggtcatgggttccagtgatccttccttgaaaaggtaaaaagatgcttagagattatggggtgtgggttagatttgcatctcactaagctgttgagtgtgggctgtgtcctggggaatacttgggaacggccatggtctgggggcaggaggccttcggagtgtccctcccccgccactccctggaggaccccgggagacacaggcgagttcgcccctgcccctgccaagccagtgggattccccagcaccccagtgagcagaacctgtttggaaagaggcttctggaaggcctgcacgattacttgtataggttcccgaagtgataaataaatgcatgggtaaaggggaatccacttagattccctaaaagcctttgaaacaaggtggtaggcgagtctgttctgatgtgttagatccccatgcagtagtgttgtggttaaaaaaaaaaagttcatagtgtaatctcagttttgtgaaattctttaaaatcgatacaaatatacacatgtttaggtttgcacatgcatggaaaagttgttctggaaagatacacacaaacctgtcaacaagtttttgctttttaactttgtacactttcgttttctttgaaaaaatgtaaatgaacttgagttactttcttaatgacaacaacaaaaataaaactacactttttaaaagcctgtggatgagaaagtagaaaaaagaattaagtcacctaaggctgagggatggactcttttttataatggataagaaactggtttagagactgacagcaaggggtaagcttactcaggtacgtgtcttttccggaaaggttgcagggagaaatatcgcagatattaaggcctctgagcaaaggcctaggctggtagggattaggtgagagcagaaaataggccgctgactgcatgcaccctggcccacgccagggacaggggacaaagttagctttataggatggcgacttgaaactcatttctgacccaaagtggagaacaaatcactgaggatcttcccccaaaagcatcagtctgatgggctgttgtggcccaaatggttcctggggaactggaggtataactggggcccggcccgggtatggagctcaggtgacccagccctggcatagtgagagcctcttgggaggccacacccaagggagacaaagtggggcttcaggaggccccacgaaggggtagaaggggtgtctaggaacttgcttggcacgtgggttcaactctgatctaggggtccctgagcaggtggtgatcacccagatgatggggtggagaggtgaggtgggggcaaatacaagttcctctgtctgcagtcgtcttgctaccccaggaagctcagggctggttgcttagcaacagcacttaccaccctcttccaccttaccctcccgcaccccacccatgggtgcctcttggggcttcccttcccccgaggctgcccctgttcaataggacatgggaagggtctgtgcacttttttgaccctgcccctggaataaggcaggaacagacataaaaggacctatgacttggaggcaagcacagaactggcccctctacaaaccagctgtttaatccaaggctggtaggggacagatgtgcagggcaaaaaaggcgttcgggagtcaggccgacctggaggactgtctcagccccatttgtgctcagttgctgctggccccaaaccacctggagctgcaggtttttcatctgtaaatcggggataagaatagcagtctcatcttacaggggttgcctgaatgacgtgcaatattttgtgaaacagctagcactatgcctggcacagagaaggtgctcaggaggcatgagctgcttttctttacgtgggggttgttccagggctgcctggttagggtgacccccacaaagccctgctgctctgtaaggccctgctgctctgtaagaccctgcaagtggccaggtgcagtggctcacgcctgtaatcccagcgctttgggaggccgaggcgggtggatcatctgaggtgaggagttcgagaccagcctggccaacatggtgaaaccacctctctactaaaaatacaaaaatttagctgggtgtgatggtgcacgcctgtaatcccagctactccggaggctgaggcaggagaatcacttgaacccgggaggtggaggttgcagtgagccgagatcgcgccactgcactccagcctgggcgacagagtgagacttcgtctcaaaagaaaaaaaaaaaaaagacctgcaagtgtggcctgtcctccccatggcccctcacggtgaggggaagagataatcaagttgagaatgacccccaagcccatggtggactctgggctgggagtcaggggccacaggggagtggcagggatagagaaagatgtctctgtcctccttagcttccgttatctgacccaggtccctttttccagctgccaataagttgtccctttttctcttagcctttctgcacctccacttcttcctgtgaagccaggatttgcctgtaccttttttgatctcttcagagtcccctgtccatgtggggacccagtagcctgctcaaggcctgggccctctttccctccctgcccactggtctctttggagctaagcggagagtggcctttgctgggttctggctctgccccacggcctggaggcaggggagggtctagaccacagcccggcctggcagctggcacgcagcaagggctcctaatggttttattaccagcaacaatgtggtgcttgttgccatccacgcacaggctggtggttcccagcccaactggtggtggcctgagggccctgcctggtactggaagctcagctgggaagcccagtggggctgggcagtcagtcacctctgcgttttcttctgtcaacaccctgccagcagcctggaatcagagggagccagggcacggcatggcgagatgctggcccccgagttggcaggcctggcagcacttgagttttctttccagaggtccctgcctcagatccacaaatgatgttcatccattcatctaagagacctactgtgtgccagacacaggctgcatagatgaagggggtcacactcatctcaatgaccctgcagcttaggtggggtctggcagggcggaaggacccctggcacaccatgtccagggattaccagggctcagagaaggaagtcggattcagggggagagaagatctggaagggctttctaaaggaggtgacgcttgagctgagtctcgaagcggagggagcagttagctaggtggacgacggcactttctggccccatgtggctgcagtgtagggaacgatgggatacgaagccaggggcctgggccgggggacatggaaggcgggatgttatgaacggacgttgggcttgggatttatatttgagaaggatcattctagggcatcgaggacgagagctcgggcaatagggtttaggggcagggagcccgggtggaaggctggcacagaagtccggggcagcaatgtgggcctggacagggtgtgcgtggtgtgacatttaggaagtgcagtcagtaggaacaggcgggataaaagcaatgaggggagttggggtggctgtctggtttctagctcagccaactgtgtgggtggggatgcccttcatggagggggcatgggttggggggagtcggagagagcaggaggtgcctcccacatggagctgggttgtagctggggcttgagggcgggtgggatttccccagggggaggctgagccaggccaggcttgcagaaggaggctggagcctgagtcataaggcctggaggcggggtgccttgtgcgatggatgagaaaggcaggtgcatttcagtctgtaactggtacgacccctgcagatgtttgaaggaagattttgaggaaggtgctcgcacccttgcattgggaatgctgatgagttagcgcctctacttcacagtgatttccccaaaagatgagctgcaaggcctagaccctggccctccacccaggacctgcggcgagcatcatcaccgtctgagaatctttgggtgggctggaagttgatgtcaagctgtccagcctttccgtcactctccattcagaggcaggtctgcggagagagataggagggacaagctggggacagcatttttggaaagcaaacagaaaagaagcaaaaactgttcctctaaaatagaaaggaggcttatgtgtgttatgtgaaggataatgtggaaggctatttccaaagaatttctcaaaaaatgacgtgagccatgtcagcatcattgaatttagatagaggccaggagcagtgtggcatcgtgctggggccaccaggctggggactggacagatgatggtttcacctcacccctgccacctccttgctgcgtgtcattggaagatcactcaacctttcttaggctcagttttaccatctgtaaaatggacataacttcacaggctggtgttgtttgttttgagcattgcttcttggactaaacctggatattttttccttccctccctcgcttctgcacttcctctggttctttgcctcccaagaagcctgtttcctcctgttccctccaaaactccaagttttgagttcccccttcctgggaaggtccattcgtcatgttctattgactctcttgttcccaattattccctgcaaacctggttcacccagtgtatttgaagagcatctactgagctaaatgggagttattgggggtcagttcctgttttctttttaataaggggagggagggtctgtgcagagctgtccgggagagcagagggcatgggggacaggggggatgttgcaggacccagtgggaccacagctgggaccttgccctgtagctggctcagtgtgccaggggataggggcacagagccctggtgggtctgggagatgagcttgggaaggacttggcctggacatgggctaggctgccctgctttccgagccagacctcaggagatggcagagagggccgcttcctctgtgagggccgtacatgatggcccttgggctgtatggtggccttgtgacatgcagccacacccctggggagacctttgaagcatctctgcattctggaggatctgctgggaagatggcttcgcagcggggctcttgttgatgctgccaagaaggccgggtgggagtcgggctgtctctggctgggggtggggtgggggctgcggtccatccgagtgtggaaatccacgtttctctggtttgtgcagacctgtgcaagcagccatgctgcaggactggccccctggaagtggggcatacatgaactcagggtgtggcgttgtaatcaaatgaaatgtacagcataattaatctggcatacccttaatgatatgcataattgtgctgcatggtaattaggtgtaaatggtaagcagttcacataaatgtttttgtaattggtattaattttgcagaggcaaaccaagtttatgtggtttttctcttcttgctctgttagttttctagtacaggcatttccaagcttttggaggaattctattgcaaatgtttgtttatagggcaatgttttgtgttttctctcagaacaatgttatgaatggttatgaggttcccaagctggtttccaaatgcctctttggcccatacagtaggtgaaatgtgcaacgcgtgtgcctgtgtcggaaggcccgcccagcatcctctggctccaggtgccccagcgtgtgcagcatgaggggggctgtgtgcgtgtgtgaacctgtgcgcctgggtcatctctgcatttgtctaggtatatctctgtgtgtgcatctatgtgtgtttgtatctgtgtgtctgtgtgtgtgtgtgtgtgtgtgtgtgtgtgtgtgtgtggggtctgcatgactgtgagagactcctgaggccacagtggcaggtagacattctctggtaaatacattccccattctagtggcacggggcctgggctggagacttaggggcatcagctgggagggggagcctggcacagcagccgttcctaggagtgagcacaagccactctgaagtgtggtctgaagccagagtctaggtttcctaagaacatatggcttgcctttctttctgatcaagcacataataatttttaaatgatcatttattgagtacctgccacgtgccaggccctatgttaaacacttgactcagattccctcctatcttaaaatagacttatgaaatagggactctttctcaccccgctttacaacttgggaaactgaggcccgaatctctcagtgacagagccagggtttgaggcagggactgctggaggcagggcccatggttctgagatgtgctgctcagaaccctgggctcttctccctccctcggccccctccacaaatggtttgtttttgttgggacagacgatgaggagaaaggcggccctgtgggaaatctgagagcagcgagctcccttcctgctgaattggttggggtggtgggggacgagctccaacagccgctcccaagccctgaagaccctttgggggacctcctggttttgacccaagagggagctggtttaggaagtggggttgggggactgtggccatggacggtgtggggagagggtggtcacaggccagacaaggactcagcccccctgattcctgtggttcactgatagcctaggccctcaccaaccccttcaccttggggatctggggcaggtgagcctacagacccacagcaggtgtatgttctgccctcggagctcctgcaaacagcctttccactgacgcagtgccttgggggctctgccaagcgacccctagaatggggattgtggggggtcgctctaggcaccgcagcactgtgctggggatgttgcagctgcctgggagtgacttcacacagtcctctctgcctccagggtcacccggaacggggttgcgggggacaagctgtgggcgggggggacgggcagcaagatacaacgcatgaactctgacctcgtctctttgagaaatcagacacatctatatacgcatggaacactcaatgacccctgggtgggtggtcgaggagaaggggacggtgttttgggggaggagagatgttgggttgaaggactgggagagaggagctgagtgggccctgtgggagagggtgggagccaggggtgtcattccgggacagcagccgggcctggaatgatgcagctgggagaggtgggggcacggccagagcagtgggcggaggctgcgttgtagccagccctggtgagaccaggccagagcgtatattttaccacgtgtgcaaatctttggcatcaccggatttttaaaaataatagctttaagatataattcacattccatacagttcacccatataagtgtacagttcgatggttttagtacattcacaatcaattttttaaaattgtcatgaggtgtcataggttttcatagagggagccatgtgtgggcaatccttgctgatagggtggggtgggaggtagagatgccagaggcaggtggacccgctccagggcatctaccaggttattgtgccacagacacaagaggtacaaagggcctggagggaatagggggacgagagaagcccaaggaccaggtacctgctggatgtgaggacccaggggaaaggtgggacctgagttttctccagggtttgggacttaggcagctgaagggaggggaatgttacttccacatagagggaaaaaccagaaaatagagccggctctgaaagaagcatgttctggaagagtaggattttagggactgcaagtcatccagttgggatgaaaataaatagagctggagcccctggcagtaggaggcgtatgttaacttatgcccaggtgtcttagaggaagagcatttagagagaagctgaaggtagaacatgacctttgaggagcacccaccgtgcagaagtgggatcaagactcccggacagccccagagacaaagctgcagaatctgaggctggagacccagaagcaaggagccagatggagtcatggctgggagagaacacacagaaggcagttgctggtgagctccagaagcaggggtctcctttcactccagggcccggctccacaatggcactcaagaaatggctgttgagtgagtgcttgaagcagggagtgattagctggccaggatgttgaattgagctcaagggccatgaggatggaaaaaagccctttggggccgcgggtgactgtatcagtcagggtccattcagaagacagaaaccacatggtgattggaacaaggaaagtttcacataacgaattattaactctaattggattggaataatgaggaattggctagtaagaagtaaaaataactccaaagaatacaaaaataatagatatgagaacagcccctacctctagggttgccacagagtgcccaaggaagaggccccgcagggttgagatccacaccttgatggagagggtgtggcgatggctccctggatggcaacgtctctgtaatgccatgttggcagaacttgctggaaatccaccctctggaatttactggaaatccatctttttgggtcccaaggaaagttgtttgtgggaggtatcttgctggaagcacaccgctgctacgttttcccaggggagtgctgggagaagctcctggctgttgggtactcctgactgacgtgttgctggagccaggtgctggagaagctgtctgcattgcaacagcctggcactcctgcaggagctgggcactggaaagctgcatgctggagaagctgcagcagcacaggagctgggtgctgggaagcttcatatctggcaagaccctgatgctgggaagcgcccatgcagcaagatctggctgctagagaagttgtatacaatgcaggaacccaacaagagcacactgggtctagaaaggaaacccacctcctccttcaatgcctcttcagtgccctccacagttgtgccagctgacaaaggaaaagtagttaaagggcccagctccatcttcacagcacaggcaatgatgggcgaataaactgataactggcacagtttacccctttggctgcacagcttccatttgcacctttctacaacatctgaactcccatacaaaaacaaacaactggatgtctacctatcaagatagttatccttcttatgaaattctcacccttttgcccagagagccccaaccatcattctaccaatccctggctacaataacttctcaaagtcagtcacagtctcactgaatattctgttacctaaagactacattataaagctaactgtcaacaacttgtatagaaaagaatgggaaggagaaaaaaagaagaaaatgattaccatattgcaaacacaccacacacacacacacacacacacacacacacacacacacacacacacacacatatatatcaagttaatagaaaatgtgcaaaaccactagaggcctggtttctgcatttgttcacaaggctacactttacacttgctacctggcttcattgtcttcttatcccattctgtgtttcctccacactcagccagagccttagcaggtcatgcttcttttacttggtggagtaacccaaaccctcattcccaaaggacctgaatccttagttatcccgcttttgttgttgttaccataactttccattcagccttcctttgggcatggacgttcttaagaggtgcctgagagaattcgctgggttccagacacagtcttgcttggctctgtggctgatcagcaatccagttttctccttggtaactaggatcaatcactccagacagtggcataactccttttttccactgtcagttcagtggcgtaaggagttcgagaaagccaagtgggtgtgtgtgtcttctctcccagggaaagcattataatatgtccctggtgggagcactctcccccgaggacgaggtcagcatccccagaaggttttagagttgtggggtggggaaacagggccacgcgcaggggactaagtgatagaggctctggagctggcagctgtggaccatgctgtagagaaggttggaaaagtagagaaacatgcagatgaccgtgggccgcttccgctgtggatgataaaatcagacccatgctggtcactgccagaccccatccaggaccatgtgtctgattctcacatggactctgtgccaccctgtgcccctgactcccaggccgtgggaagcccatctgacccacagcacgtgtgacccctagacagggcttctcctggcttgcagcacttggaaatcggtgctgccttacggaagtctgtgttggctcattttggctcctgagaacaacttcagctccttaacagcatctattttaggtataaatcccccccccgctcacttttggggctgtgtcatggcaaccattagtgtgagcaaagcagtctgactcagactcccatgtggccgccgtagtggcagcaggtttggtgtgatcataagtgctcctgctggtggtgccagtgctggtggtgccagtgctggtggtgccatggcctcgagagtggtgtgagagccacaagccgtcttattgtgactctagagccagataaatcagctttgcagagggcaggactgctggcctgtcaccagtggcttttggtattctatggacagctggtagtttgggtgcaagtaatgtttctgaaagtcagggcaatggaatggtgatggccatctcactggaaaatggcaccaagacccccctccctctccctcctccttatccatccccagtcttatgaccaagagaggttgtgacaggagggggaagagttgacagatagacatctccgtctaggaggtctcctccactttctcctggcccctagctgacccctaccctagcagatgattgggcagggggtgggggtggggcacaagatactctgctgccttctgtcacccacatttgcacctcctcctaagctcaaataggaaatttagccatgggactgttatctgtgggccagggtcaccccagaggcacaaacatcgatcatggcgctggctctgagatgtgtgtttagcatgctcattcatgaccaagaactgccacatttgcgaagggttctgagttacacggacctggatttataatcctgccctggggctttctagctgtgctaccctagagaggtattaaacctctttaagcctccatgtcttctataaaatggggataacaataggacctgcttcataggattgttttgaggattgaggatagtgcatgttccttagcacagtgcttggcacatggtaggtgctcaggaaatagctgcatgaatgaatgagtgaatgaccactgcattgggcagggcattgaatactgtgattagcatgctccagtgccctccttccccgctcccactgcagacaagcctgaccaggagagagagactgactggaaactttgttttctggccagtccgtgcccaaagttaatatagatctgcagcagtcacatgctgattgtgagagagggagtggagagctgtgagcttctgagtggggtggacctggactgtgcctggctccaccccttacccactgtgtgaccttgggcagttttattaatctctccatacctcattattctcatctggaaaatggggataaaaatagtacccacttcaaagggttggggtgaggtgtgaggattaatgagatgttgacattgtaaagctctgctcacggggcctggcatgtcggaggagcttaagtacaagctcctgcctgagcgaaggccacttagaggaactccagggatttcaagaaaggagagaaatctgcgggctggttgaatctgagagtaatcatcgttaagatttattgagtactttctctgtgccaggcgctcttggaagcatttttagggcattccattttaattttcacagcagcgctgtgaggtggaaagttctttctcccactcgacagctgagaaaactgaggcacagtttcgcctcaggccacacagctggtaagaaataaggccagtgttggaaaccccgcagttggcctcccagggagccctggaggggactgagattagcccttaggtcaggagggtgtcaaccacaagtcatagactcataccaaagtagtgaaagctcacagtccccggaagttcagagacgtccctgcctccaggaacagcaagaccaggggcccagacagtgactacaacgctttatccctctgtcttcatctctgagctcttcgttctcaggcaggctcacccacatggcgggaagacagcagctggcagcccctgactcacatcgaccatgttagcatccttccatcgcatcgataaaaaggttccagggaggcctctgattggctctgcctggtcacgtgctcaccacttgcctggggtgagggttgaggtcagcacaggcacaacgaaaaccttttgacaagcgtttcccaccgggaaggaggggaaggcatctaggtagagcagaacaaccagagtccactagaggaaaaggagaatgcaagcagagggagggagaaggacctgctacagaaatggtcagatatttttcagccattcagacagagaacttgagacggagaagaaggggcccttagggtgagaatattgggatcgtgtttggtggagtgaggatttaggtttgtgggccgtgacagttttggttttggaagaggataattatgtgcaagcccttgttgaggagagactgtggggtggcaggggggccagcagtcctcaatctgaagatggagaggaggcttgggtggtcatctcgggggtgctgatgaggctggggttggtgaggaagtgggggcggcagtggggacagtgtggtgcaggggagcagtcctgaggcttcaggagatggtggagatgtagctctttggtctgagaaggggctgagtgagcgggggttggggttacggatgcaggcagcactgacttgcgctgcccatgggctggacgcagcgggaatgatgtgtttggaggattaaacatttcgtgagggtggggggtggagagggaggtaccagtgttgtagctggtgatggaactctgtgtgggtgtgaggagctgatgatggttattctgtgggacgtgatgatttcatagaacaacagaggtggaaaggcctcagctacactcttatttatagagaaggaaatggaggccaaacgcaaccgatggctgcagttgggacgtaagccctttctcccatccccactctctctgtttaaaaattcatttttatttactcacagtagtacatgcatataatttaagaagtcgaatagtactaaaacctcctaacaaaatgcagtgattccttgcctactcctacccttatcctcttctcagaggcaaccgctttcgattctcttggctgtttcttccagcaattttcatctcatatttctgagtaaagtgcatatttttgattcatctatttagacattttccattgatttcctatttagtagatcctcttacatgtccaacctttctgctcttcagccatcctccttaaatattgacagtactcttcttatattttttcaaaaaattgtttgttgttgattgttttgagacaggatctcgatctttgcccaggctggagtgtggtggcacaatcacagctccctgcagcctcgacctcctgggctcgagcgatcctcccacatcagcctctcgagtagctgggactacaggcatgtgccaccacactcggctaattttgtaaatttttgtagagacaggatctccctgtgtcatcagactggtcccaagtgatcctcctgtcttggcctctcagagtgctgggattacaggcatgagccattgtgtccagcctcaaaaatgttttgtgcatttggtagccagaataatggcccccctaagatggccaggtcctaatcccctggacctgtgaatatgtcaccttacatggcaaaagggactttgcagatgtgattaaattaatgacctagagatgaggggattatcctggattatctgggtgggcccagtgtaatcagaagggtcattagaagtgaaagatggaagcagaagagtagtcagagcaggagatgttgatgaggcagagagtactgtgatgggaaaaagactggccatcgctggctttggagttggaaggggaccacgtggcaaggaatgagggcagcctctagatgttgaaaatgtcaaggaaatggattctccttagagtttccagaaaagaatgcagccctgccaacatcttgagtttagcctagtaaggagaatctttttttttttttactactgacttgcagaattgcaagataatttttttttttgagacggagtttcgcttttgttgcccagggtggagtacaatggtgccatctccgctcaccgcaacctccgcctcccaggttcaagtgattctcctgcctcagccttcccgagtagctgggattacaggaatgcaccatcatgcctggctaatttttgtatttttagtagagatggagtttctccatgttggtcaggctggtcttgaacttccgacctcaggtgatccaccctcctcggcctcccaaagtgctgggattacaggtgtgagccaccgcgcccggccgataatgtgttgttttaaggcattaattttgtggtacatacaaaagtaatttgtgtgtacatacatgcatatatacatatatatgtacacacacatatatttgttaaacctacacacagtgtttattttattatttcgataaaactattattcacagctgagccttgtggtgcactgtaatagtttcttttcgtttttttttccctgaagttaataattaccttgtttctcatctgccttatttttttgtacctgttgctaattcctaccacaacttctaatataattttatttttctttaacaatactgttaccttaggacttctttttctttttttctttttaactgacacataataattgtgcatctctatggggtacaatgtgatgtttcaatacatgcatacattgtgtaatgatcaaaacaggatagttggtatatccatcacctccagcatttatcacttctttgtggtgggcctaccacactttccaatagccatcagtattgctttccacacgggcagtcacagcaggtaaaagatgtttcagttccattttttaagttatctatcctctttcactctgggctagttgctttctaggcacattgtagctgatgctctgtgacttccttttgtggtcatctttggaattcccattactttccggttggaatctctgttttctggctttcgtgtcctcctcatgcttggctcactcccctcattagagcacatcttccaggacacacatctgtccatatcaaaatccattcatggctgggcacagtggctcacgcctctaatcccaggactttgggaggccgaggcgggtggatcacctgaggttaggagtttgagaccagcctggccaacatggcaaaatcccatctctactaaaaatgcaaaaattagccgggcatggcggcgggtgcctgtaatcccagctactcgtgaggctgaggcaagagaattgcttgaacccacaaggcagaggttgtggtgagccgagaatgcgccactgcactccagcctgggctagagagcaagggtccatctcaaaaaaaaaaaaaagaaagaaagaaaaaatctattcagttcctgggtttagatagcagagtatggccacgagcgatacctgtgtagttttgtcaggtaaaaagacagttcgacagcagagggcatggtgatgacggcactcgtgccccagtctcagtgggaaggctggccctctctggctcatgccaggtgactggcatgcggcctcttttccccttcatcctggagcctcccttcccatctctcctgtactggatcttatgcgtattagaggacatcttcctgtccttcctgggaaaggagcgtgaggcctcatatgtctgaagatgtctttactagggcccagcacggtggcttacgcctgtaatcccagcactttgggatgctgaggtgggaggatcacttgagcccaggagttcaagatcagcctgggcaacatagtgagaccccatctctatttaagaaaaaaaaaagaccccgggcgtggtggctcatgcctgtaatcccagcactttgggaggctaaggcgggcggatcaccaggtcaggagctcgagaccatcctggctaacatggtgaaaccccgtctctactagaaatacaaaaaattagccgggtgtggtggtgggcacctgtagtaccagctacttgggaggctgaggcaggagaatggcatgaacccgggaggtggaggttgcagtgagccgagatcccaccactgtactccagcctgggcgacagagcaagactccgtctcaaaaaaaaaaaaaaagaaagaaagaaaagaaaagggccaggcgtggtggctcacacctgtaatcctaacactttgggaggccgaggcaggcagatcacgaggtcaggagattgagaccatcctggctaacacggtgaaaccctgtctctactaaaaatagaaaaaaattagtcaggcatggtggtgggcgcctgtagtcccggctacttgggaggctgaggctggagaatggcatgaacccctgaggcagagcttgcagtgagccgagattgcaccactgcactctagcctgggcgacagagcgagactccatctcaaaaaaaaaaaaaaaaagaaaagaaaaaagaaaatgtctttattttactctcacacttaaatgataatttggctgaaaataattctaattggaagattgtttaagatttggtttattctttaagaattttggctgggcacggtggctcacacctgtaattccagcactttgggaggccaaggtgggtggatcacttgaggtcaggagttcaagaccagcctggccaacatggcgaaagctgtctctactaaaaatacaagaattagccgggagtggtgacgggcgcctgtggtcccagctactcgggaggctgagaaatgagaatcacttgaacccaggaggcggaggttgcagtgagtggagatcatgccacttcactccagcctgggcaacagagaaagactccgtctcagaaaacaaaaacaaacaaaaaaacccaactgatcggaagctctgagaatgatagtggacttgttggttttcaagtctacataggctgacctgaataagtcattttgaccccattttggtactgatgttggtattggcatccttaaacctttcctcttagactcattcgattctccagagaaggaaatggttgtctggctgccagtattcttagagcccaatcggggaatagcctgagagactggacatcagcatttaaaataaccttcccggccggcgcggtggctcatgcctgtaatcccagcactttgggaggctgacgtgggcagatcacctgagattgggagttcgagaccagcctgaccaacatggagaaaccccatctctactaaaagtacaaaattagccaggcttggtggtacatgcctgtaatcccagctactcgggaggctgaggcaggagaatcgcttgaacccgcgaggcggaggttgcggtgagccgagatcgcggcattgcactccagcctgggcaacaggagtgaaactccatctcagaaaataaataaataaataaccttcctctccttggtttgatatatcatctttgtcttcagctgtgccaagtgactctgtgcaaagaccccctattttatgccctccagtgactacagataaaccttcaaacttgtagaagagggtctaggaattcactactctcactcagcctctcgtttctcacacaagcatcctcttcagccctagtgccagagtacctggtgctgtcatataagcatctgttgaagactgtgttatatatcagcgttcacacgcctgtctgaaatttggctgtcacaagtctgctttccagattccacaattttgttggtggtattccttctcttgttcagcctaatcttgtgattttatgtcttaaaaaatcttttggccaggtgtggtggctcatgcttggaatcccaacactttgggaggctgaggtgggaggatcctttgaagccatgtgttcaagaccagcctgggcaacatagggagaccctgtttctacaaaaaaaaaaaaaaaagccaggtgtggtggtacatggctgtagtcccacctactcaggaggatgaggtgggaggatcacttgcacttgagcccaggagtttgaggctgcattgagctatgatactgccactgcatccagcctgggtgacagagcaagaacctgctctaaacaaacaaacaaaaaatgtttctattgcattgagtttagaaggtagtgagccttggtatgcatattcaaagctttcagttctttttccacaacagttttatagttgacgcagtggagatggtgatcatatcagctgtgatacgaagatgttttcatggtgggattccttgaaattttttaagtggctgttacaaacattattcatggtcactgtggactctaaaaggaggaaataaaagctgcttttcatggtggtagggttcttggcaagggttttttggtggcagtggtggtggctgtgcagcccttggcccaggtgggaagaacgctttggtatcggaagcagccagggctgtgcggtggaaggaccgatgtggtggacacccgctgctgtgttgggactgtgggcccaggagagcccactccccatggctgggctgcctgaaggaagaatgaagcgtctacgggtaggtgggcaatgctatgtcaaggtctgggaccttggccaccaactggggccccctagagttgtgtagtacatggcccgcccagacacatactggaggattttaggtgatggacacgattttgagggactgctactgacagggctggtccattgagcaacacgaaagggttgacccaggtcagctgcattttctgtgaggacagtttctgcagctcagatgtcagagtcttgggtggaggaaggggaggaggaagagaatcttcctttcctttcctgtctggggtgtctgcccttggggccaatgccctgtgaagttctgcttttccctccagcttccttcctctccagagcttctctgaacctcgccacacccgtggcggcacagatgccctctgggtgtccctaagcctagggcagcatcaagacaaccctcccgccccgcttcctttgtgcctgggtctcccccgactccatttggggtgccctgtccttgtcagccccttgtgtgtccactgtgcctgtggggccgcaacagcttccttggccggtcagagctattaatagaaggggtcctgctctcccatttcattggtggggaaactgagggccggggaagcctccgtcaggagtagatcccacccctgcggactttgggctcaacgttctttccaatcagactctgcccctcttagcttctgaccctttcgaaggtttttgttttagtgtggctggagatgtctgtggtaacaaatggggagtgaggcttgacagggaatcactggctgctaagggctggcagccgagtgcttctgggttggaccagttctcttttgggatcttcagagttgcttctgtggtgtgtgttgggggacgtgaacccaacccctcagaactttagtgtcagagagatctgggttcatgcctctgatgggtcctggccttgttgatcttaccgtcacctgtaaactgggcacggcacagcagctgcccagatgcagagcacgagccaggccctgagtggcatgtggccgatggagctgctctccgctgccgtccaccctctcgggacccgggcagcaaaccttccttaagcccagcactgcgctgtgcctaggggtatggggaatggacgcagtgcacctgggctgcctcagggctcagctgtggggcaggtccgcttcaagcctttctgggttgacctgatggagctcttcctgtcctggccctaagaagctcctcctgccagctccttcctcccactaccccctggggcacagccagggctggggcacccactcccaggcaagaatgcacccctggagaaaggggctaggcctgtaggagagccaagcctgtgctttctcccggtcctggttttccagggagccctgactggagggggatgggaggagaagcccaggagggagggggagctggggaagcagaaccaggaactggaaggggaagggtgtgggtgggcccagatccagcctgcctcccgctctcccttgcctgccaatcccctcctgggccctggcacactcaaggcaggggcttggcggccgcctcctccgggggtggggagcaggggagctcttgtgtgtctctgagtgagggggctgagacagcaacacccccaccccagctgtggcctgagctgcaggctttgttatttctctggcttgaggcctacacctggagcagagggaagaaaagcccctaaactcagccgtgtgggttcagaggacccctcaagcccaccaactctgcaggcaaatgaggctggttcatggggtgggggagagagcagcctcactcctgcctcagtgtggccgtggcctgtggccttggccgtggccgtggcctctccctcctaggccagagccaaccaggcctgcagcctgagctcagacctcagctttctctgggcccaggcaccggtcctgaagtgaggtgacattcatttcactacatcctgtgactgcactcacttcctccacgtggcgggaggtgtgggggtgggggtgaggacagattagaaggaaaacgtagctgggctaggggcctctgggggaggctgggatttcccaggggctggttggggtgggagggaggatgcgggaagctttcaaaggagagagaggctgtgaatgaagagaagggaggaggcggaggcagctggaggtcccagaagtggcacccattggccgcagcgacacggaggggagactgctgccactccaaggctctcagaggctgctggggtaggaggtggccctgaagggagcctgcctcggtttctctgctctctggggtgctggtgaggccagaaggaggagcaacaccccaggcctcacaggccaggtgtggccctgggctgagggcctgacccagggagggtggggtgctccgccccactgatcctcttctctcccccacaggtggagccatcgaagcccccacccacaggctgacagaggcaccgttcaccagagggctcaacaccgggatctatgtttaagttttaactctcgcctccaaagaccacgataattccttccccaaagcccagcagccccccagccccgcgcagccccagcctgcctcccggcgcccagatgcccgccatgccctccagcggccccggggacaccagcagctctgctgcggagcgggaggaggaccgaaaggtgagcagcgggctctgctggggaccctctggcctgggagagggagagccctgtccctatgtgatgacagccggctcctcatactgagtgcatgaccgcatcactcagtgctcacgacagggtgtgggaccatcacatccctgtttgggtgatgaggaaacggaggcttgcagaggttcaattctggtgatggagcaggcatttggttccaggacccaggcttttaaccaccatggcattcgcacagtggctcaaagcccaggtctgtgccattgtgagggttcggcctcacagagagtcccagaacctggattccttctcggacccgcctcttactagccgtgggccttcacgtgaatcactttctctctcagctgcctctgtttccttaaggtgttcagtagcttctaggggaccaaagacaagttctggggtggggcacggcagacacgaggccgcgggggcccaccctcccacacagacggaggcacaggctgggctcagtgtggcgccagcacactttggagatggtgatttcctgtccccgccccccaccccagactccaggtgaatgtcgctgggttatctttggtatggcttttggccacggagctggtgacctccatgttttcagaatctagttgggggtggcctctccacccttctgctgaactccaggttgtgcctgaatcagtcagaggagattacatcagactgatgggagtccctgctgggtctccacaggctgtcttgggaccttaccaagctgtgtccccatgataggaaaagctgccccttaacccccagcactggactgtgttgccctctgtcagtggaatggtgaactcactgccaccctccaggggatcttatgatggccataggccttcctggcatgtctgtctgctgtgcctctgtccacagttccccctgcctgctccccttcccctgagtagcgctgggggttgtgctgcttggtggtgtctgggagtagctgggcatgctcatgggggcaccagttggttcttttggaacaaaggtggacacctggcaccagctttgggggccctgggcactctggggctagaggcagccagcaccctacctgaagggtgtcagctctgagacctccctcttgcgtgctcagctccttcctgggtttaccattcttcagagtgtgtttctgtttcctagttttccatcaatggttctatttggtccttggggacaactcttgaaacaaatggggcagggacagatggccccagtttacagatgaggaagctgagccccgctgggcagtggcaggtccagatgacagcctgttctcctgtctcccaggtccgagcccttcccacagccctacctgcataggtcctgctagggacacatgtacacatcccaggagtgcacatgacgcccagggacctgccttcccagcccagcaccctgtagagcaccgtgggggtgtgtgcacccagtcagccagagcaggtcagaaagccagcatgcgctgcggcccactgggcaggacgcccggggcgaccgatcaggctcctcccttctgaatccatgggaaaagaactgatagtcctggatacctgcgggcccctaggctgcccccgctcaggactcaagcagcatgaagacccaagccctttggccgtagagttggggacacctgccgctgtctgtgctctggagtggcaactgtggccatggctgactccctccccttcttgggcctggcttgctttctctgtcggataaggtgaccccgagcgtcgccccactctgggtccgatgtcctgacagttgctgacgcagctccccatcaatgcactggcagtcactggtcagctgctccccacaggtggggagggtggggacagctgggacaaactcctcctgttactggactgtactcccacgccgctgctgctgctctgggctgcggagccccaggccaccaccaatggacgggagcaggtcaggatctgcattataatagctcaggactgagaagcaacgctggaccaggagtcagaaatcccaggtcctagtcctgagtatgccacttactggagatgtgacttcaggccatctgggcttgtgtttgctcagctggaaaatggggatagtgactccagccttgcctgttttaaagggtggttgtggaagtcagataaggtcatgggcatggaagtgacctgcagacagcaaagtctggtccaattatgagggattacgattgctattattatctacccatagtaactgctctggctcaagcggcaacaaacacacacccagccctagatcccggtgctgatagagtgcacactcacaccccagcaggaggggtcatgccaaaagatggcagtgatctggatagataagggctgggccatagccaggcctcctccccagccgcccacacctacaccacgcatgctggctcacctggcacacttccccggcacctctgggctggctccagcacctccagggagccgcccagggagggtggggagagacactgacagccaccacagcagcccatgaaagccaggcctgcggcaggggtgctggtagctgcagaggggaagacacaggcttggtctgcagcccagggagcctggcacaggtgccaggggcactgtgcacaaaggaactgtttggcaagccagatggaaggggtgtggccaaccaatggcccttccactgcctggccccatgtggccctctagcctctgcccaccgccgccccccctccccgcccccgcccccagccccgcctccatgcacctttcactccagccccactcccatacttcctggagtctccaggtctttgtttatgctgctccctctgccgcatgggccctttccctaatctcttctcctccctggtcaaagcctcaaagcccaggctgtagttggccttgtattatagtttgcaggggaccagtggttctcaaagtgggatccccaaatgagcaacttcagcatcacctgggaaggcaaagctcaggccccattccagacctgctgagccagaactcgggggatgggacccagccgggcacctttaaccatccctccaggggatactgttgcgcacagatgttgagaactattggtgtagataacttctgcccactgctagcctggagcgcagggtcacggcccttttcttccatgtgaatcccccggacctggaatagcacagagtgggtgcttgggaaatattttacggatagaacggaaagaaaaatgagagtagccaagaccctcccacaggagaataatcccggagcccaggatcagggaggcggagtgcagagctgtgggtgctgggctgaggcagccatgctgtggctgggagtgtacagagtggcctgtgtgtgtccccctggcacctgccgcctgccctacccgccatccatatggtgggcagagcagggctgcttggggagatggggaggaggcaggccgagctctggggctgtggtcagggcgagtcagctggtaaatgttgccgcagcagagggagggggctggcctcatggagggtgggtggggaggcaagcagtggggaggctgagagcttagaggggagtatggagcagagggtggggggcagagggagcaggacaggggaccaagaacagtccaagggccacctcagatccccaaatatgaatcagaggggagtccacagccccaggccaggcccctgttctcagttctgtcccctttcctctggcctcagaaacacaatggctaagatgcattgaacgccgactgccaggtgctatgtgcatgcattatcttattccattctttttttgtttgagacggagtcttgctctgttgcccaggctggagtgcagtggcgtgatcttgtttcactgcaagctctgcctcccgggttcacgccattctcctgcctcagcctcctgagtagctgggactacaggcgcccgccatgcccagctaattttttgtatttttttttttagtagagacggggtttcaccatgttagccagcatggtctcgatctcctgacctcatgatccacccgcctcggcctctcaaagtgctgggattacaggcgtgagccaccacgccgggcctatcttatttaattcttacaattgccgcataaggtagacactattattttcatcattctatcttattaagggctaaactgaagctcagagaggttaagtcacttgcctagagtcacacagcttgttaagtgctagtgctgaggctggaatgaggctggcttctgcgctccttaggctgtctcctgcgtgaagggggatggagtgaacagtgccccccggtggtgatgtgatgagaattcgtagtcctcccctggacttttgctgcaggagaaagcctttcactgcataatggcgctcttgcccttggggagaagttgggggcacttcatctccagcaagaactgcacacaccacctgcgtgtacaggcacacacaccagatggaggcactgctgcagacatgcagcttcttaccatttcttcctgcctcctgccctccttccttccctgcctctccctccctggacatacagctcctcttttcttctcttcctccctccctttcttcagacataggtacctttccaggtagttagcatgtagcagggctccgcaaggctgttggatgaactgagtgaccgtgcttggagggcctagtagaggggtaggaagacatcgaggtgggtaagccatgcctgccccccaggggtgggtgaggcctgctgggcagctcctctgatcaagccttctcctgcctgtagtagaagctgcagctggggtgcatctttgtgctggggaaacacagcacttatgtgtttgcacatgtgcgtgcgtgtgtgtgtgtgtgtgtgtgtgtgtgtgtgtatgcatctgtgggcagcattggggctgcggttcctcctttcccctccccatcaaagtctggcccagaggcctggcagccactgatttctcgtgggctctctccactctggtctgcaagtacaagggcctccatccttgggtggggtccctgccagttccagtggcagtcattcttgctgcccgcggtctgtcacctgctcctgggcatgttctgcctttcttgcactcagatgcccccacatggtcacttagggctggctctttgcttgacagtggttgcggtaaggtcatttcaaagagcatccttcttagtatgtttaaatagctatagaaaagccgctgcaccctcacctcttcagagacccagccagcgataatggcgcgctcactctgatctcgggggagttaggagagggttgggcgtgcttagcaggtttgtgatgtaaacagtgcccatccctgagctgagcaggacctacattttgggcttcggtttctctaaaattctcttaaattggacattattacatgtcaaatgtagttaatcttggtcagtacagtcttggatgggggttgtttggcccctgcagaagggcctgtgttgaagctggactctgtcacgtgacttggaaacatggctgtgagcaggaaaacagctcctagttggcttgagaggttcagacgagatggtgtgtgcaagtggttaacaccaggacatagcatatgttaagttagctttataatttattttggatatctacctacccatccacccacccacctacctgcctacctacctacctacctacacctttgtggtttacacccactgccgccccatgaattgcaggggcgtgggagaagagtaggaaaccatgggtggggacagagtgtgggcttagagtccactgagagcctagcacgtgaagggaatgttgtctctctttgggtcatcagtcactaaaggcctgagttccctttatcccttgaacaaaagtaaaacaaggcaagtggtgatgagacctaactcctgatggcaggggctgtagatcccttcaggggcctaggtgaggggccacagtcacttgggtccctcctgctcttaatggccgggttagggatggagcccagccctgctgataaggtgagtcgcccagggccagggcaggaaaggccaggctcagctgtgcagaatagaagaatgggccaggcgcagtggctcacacctgaatcccagcactgtgggaggccaaggcagatggatcacttgaggtcaggagttggagaccagcctggccaacatggcaaaaccccgtctctactaaaaatacaaaaattagcccagcgtggtggtgcgtgcctgtaatcacagctacttgggaagctgaggtgggagaattacttgaacctggtaggtggaggttgcagtgagccaagatctcgccattgcactccagcctgggtggcaagagcaaaactccatctcaaaaaaaaaaaaaaaaaaaaaaagctgcggtgtgtggtggctcatgcctgtaatcctagcccttcgggaggctgaggtgggcaggtcacctgaggtcaggagttcaaggccaacatggtgaaaccctggctgggaaaaaaaaaagaaaaagaatagagctgagtggtggagcagtgtcccaggataattgggaaatgagcctttcctctctggtacctgggcttggcacaggagtcctggtcataccctgcagctgcctctgcagagagccacagggcattagggatattccttgtaatcatcccacgtaatgtttgtgctgcgtggaagggcatgtaaaggagtgttctctgcacggtaattgactcattctgtcatcatgattagttagggggcgcccagagcaggatgatggtcagaggttcctcatccccattttaccgatgaggaactggggcttagagaggccacacggctacaaagtagttttatctggatcttcccctctattaagcaagggctggcagagctgggtgtgctactgaaggagcagacatgtgtgggcttggtgccatggaagtggccacaggcagagcagtagcacactccagtctgggctcagcatggcatcaggtacttgtttacatgttgttgtctccctctgaaccgagtttcctatttgtttatctttgtatccagtacacagtaggtgctcaatagattttttgagtgcacccctgtgtctggccttgtgacatagagacctcagaggtggacagggctgaggtgtgctgctcgtgggtgtgaggtctggcccaccctgcacctccagaagacaatgaggccccagccaggtggacaggctgtggacaaggggctgcagccctggcacgagggcctgggaaccagatgggcaccaccgttgtcagctatttagcatttctggaacacctctgtgtgcaagtacccaggagctgtgggggactcagaggcgccaatgagacacggcccctcccctccaggagagtggcctttcaggaggatggaaggctttcctcggtaattatgacacgacctaagcagtcaatggttacttgtcggatattgttgaataattgaaataaagggctgatgagccttgggaggtgactgagatcagaaaaagtagggggctttggagggctctgggcccatgcgcatctacagtgattcccagcccactgcctgacccctcacgctgggatcagcctctgcaggttggcctgggcacgggtgtgtgtgcaagcatatgtgagtgtctgtgtggcattggggtacgcaagcgtgtggctgtagctctgcagagcctggtgctcaggcaacccaggacagggctctgcctcttgcagaagccaattcgtttcactgaattccatgaccacagacagtccctgggaggccagccagccagctggcaaaggctgggcatgcttcttgtcccagggggcccgggcaagtagctggctagatccggcaagttcatcccctcgactcaagcaccaactcgagacatctgctcaaccgatgctgggtcagtagcatccggtttaagtactgaagggaatacacgtatgtcaggctggctgtctctaggtgagggcctcaagagacataaatctcttgtggggaggggtcctgtgtctgggcacagccagcccagagtgtctgtgcctgtgaatgccagtgtgccttgaccttggattgcctgtatctttatggtgtcactgtgtgtgtgcctgttgacatggtagggtatagtggcatgttgcagtagaaagaccgatggactggtaaacaaaagatgtaaattttggttctaaaggcctcctttcctggctctctgatccctgcaagtcagataatctctctgagcttcaggtgtttcatctgtgtaacagaaaaaaataataccagctctgctttctgtaaagtgtaagaatacaatgaaataacatatgtgaagatgctttgttaattaccacgttcagtgcaaatgtgagagattattatcgtcatagcccagcgcatcagaatgagacgttgtatatggcttaaaataatccatccagtgagcagtgttgaaatgtaggtcagatcgtagcctcagatgtttagagagaggaaccacctaatctcacaggccaccaaatgtgaaggtgctttgaaagctgcaaagaatgacataaatgcaaagtgacaattatgtttaagtctagaagggacgttttagtcctcttgtttcctaatctggaatcgtaaagatccgagaggcactggaacctcgtacacagttgtatttgtacgggtttgtagatttgtacgtgtgtctctgtttgcgtctatggactcacgtcaggcacctactctgtgacagtcattcatcaagtgcctgccttggactaaatgcatccgtctaggcattctggatgccagcatgaatcagacacccacacttccctcaaggagctgaccgttgccttgctgggtaggggaactataggagaggaagggtctttcagctcagtctaggcaggggatgggaggagggggcctaggggcagggaatccaggataggaggctggaaaagcgagtaacagtttgctgataaacctgaggggaaggtggtgtggtcagaagaacagtctatgcctaggggctgaggccggaagcagtttgctttcgcgcttggtgctgtctgttgggaccacagtgtggagaagagaccaaggcgatccagccaaatcctggggaccgccctgcacatgagctgaggagcttggctggatcctcctggcccccgggaacccccgtggcaaaggtttaagctctgcagagtggcataatcagctttgcattttggaaagctcctagagccccagtattgccacatatcttgcggcaagagcgcccgccagatgttgggctctgtgtgatagtgagggatcgctgcatatggtgggcggcgtgctgggatttgcacgaggcagggagagggggatggggaggatggagtgggagtgaagtacgaatcaggatgtgtggagcgggggaaggtagcagttctcgagtgactatcacgtgtcagcttttgctacatcacctcatttaattcttataacatcactgtgaagtagatatcatcccattttatagatgaggaaagcaagactcagggaggttaaagagcttgaggttactcctaagcaaagagcagagcgaaactcccagcccggctctgccctctccaaagcctacgtgtctggaatttccaccccctcccctctgcgctggaagtgtggacgaattcagtcccctggcttgacagatgaggaaaccaacctgggctcaaatctgttcccgcgaactgtgttactgttcttcagctgtcccatgtcaccacggatcagattcttttctttcagagtattagcaacgcctcctaattcagggctacttgcagatttgataagcatgttttacattcctttgctcaacccatcagcaaagatatggaataaaacagaccccgtgacagatgcgagaatgaaccacttgctacgcttccttggagccattgaggggcacggcccgagccatctgctcacccttcttggcgtgttagccccctccctccgcagagggaacctcaggcaggcccagagcagaagcatcgcttcccgctttgccctaagactccatcgcggaagagttggcagaagagaacatgcttttcacaacgctgctcttagggccaaatgtcaaggggaagggccaggagttgttcagacctggctctcgtggagactccaagcacgacccagaagcatgcggggcctgaatgctgggccagccgtaaagctccttgcaccaggtgtggggtacacacagcacccctgcctggcactccccgccctctctggacctgtcaggacctggagaggtggcctggcaccggggggtccaccccttcctcctgggctgggttgcacggaattgaatccaacagggaaaaaaatgtgccgagcacctacaggccctgcacacgtggtgtaggtgagagatgccagcaggactgcatatggcagaggggtggcctgtcggggcccccaaaggctttctccgcatgcccagtggaagctggtgcccatcgtgaaatgtcaagcgtctttatttttaggtcattgctgtgtggtaactgtggttccctttcactgatcagacgctctggttggctttcacatctctgattagttcagaataaaagaaagtcaaatgactccctctgtcacaaatgcagcttgttaaagaaatagtttaaagcccagaatttatgggcagtaggagtttttccagaatctgccctaggcgctggggattcagcagtaaacaaaacagacaaaggggcagaccctttgtgaagctgtcttctcaaaacctgagaagcagacaggatggacacctccctacccccattttatggatgaggaaactgaggctccgagaggctgctcctgtaactaggaaatggacaagctgggctcatgcccactttgctttttccatgacctcacatgacccctaatgattttacaagtgctgatcaagacggtgcccatttggcactggttgaatcggattagaagccccacctcagcctgaaattcttagcagttgtgtagatccaatcagaaccttcacaaatactaagctgcactggcaatacgtcctctctgtgtgatcctttcttacactcgggggtctggggtcttcagaagatggttcagaagcagcaggcctcccctcccatggggcgtgtgcccttgggcaccctgagccctcatgaaggctcccgcgagtttgctcctcctcccacagcctttctgccctcaccgcccgtctgctgtgctttcctgaaaagagcccctgaaggatctccggcctcggggctggcctctccctccacagacggcacggggctccccagtcccctggcatcctttccagatgcttcctctgctgtgctccttaaattgccctctttggtccttctccagccctcactgccgtgtcactctgcacagcttagtgacagtgctcttgaaggtcagccattctgacccctagccaagcctcctcatcctcagtatctttctcagacagctttggtctccagtgttggcagccctccccttccttgctcccacaacacaccagggtcctcttctgcacctccgagcattctctctctatctcctgtgtgagctctgcctctctccagcttgactgtggccaccacctatgctaagaccgggcacctctgttcaccctccatgtgcatgtctttggaggcctcccagaacttgagccgtgatggtctgccctgcagacatgcctcagctggaggatggatggaggggccagggatgctcttcccgctggtcttatgtctacagctggtcacagtaggtttccatttgtgtgtcccactgtcacctaaaaattaatgtggcaaaccacaaggtattttgcaatcacagaaaatgaaagttgagtaggttgttgagggccatcttactcaggtctccaggagagctgtggaccctcttctacctctgtgctgccagcactgccctgggttggcccctccttggggagggcccaaaagccatctttggctcctgacatcgtgcagggtatgaagagcagcctgtggcccatctgcagggtcaggacgtctttctccccacttccccagcatcatttctgctggggattagtcatgccagagcccagctgagtcagaagggacttgtgggtggtttgtggccaggctggagtagtgaggcaggactttctaggtttatgtctctgtgccccaggagacaagcatgtcagggcccagccgtgcacaggtgttatgtgaggggcggggagtaaaacaaacttctgttccaaactcggtgaatgcaagagatggagaggagctgagattcggtccctgagatcctcctgcaggctgacaggcatgcgcggtgccagctccacatggcaggggtgttcacagctgtacaagtcctccactttccatagttgtccatttcgagtattgcctggacttcaaatagatattgctaaatttaatatttcttttcacttgattttcttttttttttttgagacagtctcgctctgtctcccaggctagagtgcagtggcgtgatcttggctcactgcaacctctgcctcccaggttcaagcaattctcctgcctcagcttccctagtagctgagactacaggcgcgtgccaccatgcccggctaattttttgtatttttagtagagatggggtttcatcgtgttagcaggatggtctcaatctcctgacctcatgatccacctgcctcagcctcccaaagtgctaggatcataggcgtgagccaccatgcccagcgattttattttcaataaaggtgattcattaagtagatcacaaatgtaattgtgtatctgtgaacaaaagctttctcatataaataaacttttaactcaaatcctttatcagagcttgtgttatgattttatggttcggaaaatgtggtcataaagagagagagatgccttccggggggacagcagcgtctgccctgaagttccccaaaggatgtattatttatatatatatatatatatatatatatatatatatatatatatatatatatatatattatattatttagatatataaatatatatctaaatatatatctaaataatatattatttagatatctaaataatatattatttagatatctaaataatatattatttagatatatatatgggtgtgggtatttttatagagatggagtctcactatgttgcccaggctggtctcaaactcctggcctcaagggatcctcctgccttggcttctcaaagtgctgggattacaggcatgagccacggtgcctggccaaggatatattttaagtggggctctgaggggtgcctcaagcctcatcaggcaggaggggagttggtgggggcatattacacagccctggaagtgtggctcgtgggacaggaggaggctggggctggaagggaagccagggccagccccagacaggcctggaatgctacactgctgggatccacctctggcctcacaggctgtgtctgtgcctgcaggacggagaggagcaggaggagccgcgtggcaaggaggagcgccaagagcccagcaccacggcacggaaggtggggcggcctgggaggaagcgcaagcaccccccggtgagtgtcacatcctacacaccctcctgtgcacacacacaacacacacgtgcctggcctgtcgatggcagtgatgtatgtcctgcagggacctggagacatttaagaccaggtgatggggtatacccctccagctgcaggtaccccattcttcaaatcccaccctcacatttccctgttttcttatttatttatttacttttttactgagacggagtctcactctgttgcccaggctggagtgcagtggcgtgatctcggcttactgcaacctccacctcctgggttcaaacagttctcccacctcagcctcccaagtagctgtgattacaggcacgcgccaccattcccggctaatttttgtatttttagtagaggcgagatttcgccatgttggccaggctggtgtcgaactcctgacctcaagtgatccgcccacttcagcctcccaaagtgctgggattacaggcatgagccaccgcgcccggccacatttccctgttttctgcatagagaagtggaggccctgagaagccaggggacttggctggttggtcttgggcctaagacttggaccaggcccctgactcctggcctccctctggaagggaagcaagagggcctgccagaatcccaggctggactaagatctccctggactatctatgaaggcccctccctaccacactctcacccagggtctcagcccccacctggaggaagggaactgaggcctgggagtctgatcaaatgggaagggggagatgcaggctgaggagtctctgtgaggcagcaggagaaccagggccctggggaaggaagtcctgcaggcatgtaggctgcagggccagccccagcgccaggcttctgggaaccagtgccgctgaggcctgggggcagctctggagaacaagacccctgggctgtaggagcctaactggtttatgtcttaaactcagatgtggagcagtcattatttcccagcaccagagacagctggttcctttcttttaccccccttccagctgagaatggtaaacttggagcaagaaggtaagggggagtcagaggctctggatttgttactcagcccttcaaagaaatgttctcagcaggcatggagcccaggacttgctccctttgggtagagagccgggttgaaggtgactgaagtgaaatgggacagtagaggcggggggggtggtgagttcctggaggtggggggtgtgggaacctgctgtgtactgagatgcacccctgccagttctgcctgaagatttgaggcggggggcaggggggcggagtgaagtcattttactggtaagtaattttaaaccttttaatattaaagcaaacgtggatatgtaatgaatgaaattcattctggaatgaaaaattcacgtgatgttgaaaaataacacggggcttcagagaggactttctggctggcagcagactccagattcccagggcccctgcaccctcctctgcccacagggcaccttaatggagaaggtgtgggaggagagccaggccggagtcagagcacactggtgactccacatttgcagcgtgccctgcctctctcctgaggcttggcaacgtgcaatatgctaagcaaactccccctgtccccgtccagtttctgaggacaagagccaccacctgtagcaaataaagacccagcaaccctttgactcatctttgtgagtctctggaatcagagggtagccacatcgctgagaggtggagtgaagcactcgggtgaaaaggtacaaggaagtcagggacaggagtgtggggacatcacctagacaatgacagagaagaggggcacagccgagtgaggggagaggggccggcagtcctacatcccctggcctgaagcacgctccagggcagaaggaaaaacactgtctttggggtccaagagacctgagttcaaattctggctccaccactgaccacctgtgtaaccttgaactgctgctgcctgaacctcaggttccccttctaaaaatagaggagaaaaggatgcatttctccttgcccctgtgagaacgaaatggtgcaagcaccaaggagcctcagcaaaggtcgggcctgcccccgcctggccaaacctttcctcttcaggaggccacggcaaccgtagtttgacagaagagcagcaccttgatttaatgcttcccagcatgtgtccttgagcaagtcacctaacctctctgggctgcttcctcattgggaaaatatggctgccagtaaaacctgccctgtccacctcctggggcacttggcaaacagcaaaagagtccaaatgtgcaggctgggccaggcgcagtggctcatgcctgtaatcccagcaatttaggaagccaaggtgggcggatcacctgaggtcaggagtttgagaccagcctggccaacatggtgaaaccttgtctctacaaaaatacaaaaattagccgggcatgatggcgggtgcctgtaatcccagttactcgggaggctgaggcaagagaatcgcttgaacccggaaggggaaggttgcagtgagccaagattgtgccactgcactccagcctgggcaacagagcgagactctgtctcaaaaaaaaaaaaaaaaaaaaacaatgcagagctggctgtgtaaaaaacctgttccactgcagggcccagtgtccaccaggctggggtgcaggcctatggggtgggggcccagcatcagcctctcagcagccctgggaggcggggcgcatcccgtgcccctcgtggtctggatgtgttctagcccaagtcctaggttacacctgccgtcgcctggcctctcaggagaggcccagggtgaggaggagcatggtaaaggtgaagctgattgggaagtcagctgttgggaaagcaactccttgcacattggaggaaccgagaaagactgaccccgaggacagcagccagcatggcccttcctgggagcccatgttgggggattcctgctgcagccaaggctcagcccttgtggtcgcaggtgctggtcctggcctcttcccctcccatgcaggagcacaggagagatggcttctgaggacctgttgcagctgtggccctgggaatagatttgccagggagctttaaagcagctgagtgtgtcatccagctaagcctggggaaggagcttggctcaggtcctgacaggtgtgacagggatggggactgggaagtaagagatgaaaccctggctggaggctgtgagcttccacagccagcgctggacagggagggtccagatatacccactagtgccctcaccaggtcccacccccaagcccaagaaatcctgggctctctcctccttttgcccccaaggactgtctgtcttggccttcaacaggcatctgtccctgggtgccttctgccccctggcattgccctcacccaaaccagactccacctgccccttgcatgcccaggccagtgtgctcccttcacgacaaacactttccacttcctgagcactgaccatgtgcgggaagccaccagaggaagatgccttctatttcagtcaagtgtgctggagagaggaggccacacataatcacagtaaatgtagcaccggcacgtccttcttcaggaaccccccgggactccattttttaggggacaagatctgaattccagcccctcaccatctgaccactcctttccctgctatgcctgatgccacccctttggccacagaaacctcaccttctcactgctccccaaacacactagccagccattcctcctgcccgccccttacacagttccacagcctgccttctctccgcctgccccagcaccacagcccggtagaacctagcctgaaaatgaagcccagttcagccactgtgacccacactggcctttcccttctccaactgtctccaaagttaataaaaatgaactgataaagacaagttccaagcccaccgatcacacacatgggactgcagtggtctgcagacctcactttgagaagcatttgttgtcacctgtcggtacagaactgagtataactattcagaagcttttatgtgtgtgtgacaatgttgccacatccacgtgctgtgattttatattttacaaccgtatcatttcttggtgcattgagaatttaaaaatctggaaccaaagcttgagctttcatccctgacagtttgaaaatgcaccgccattgcatagtcgctgagctgtgccacactgagtttgcctgcctcactgaggacagagaccagcagtaaaggctcatggttatgcagcatgttactgcctacaaaggcgttttacaggggttaccttatttgatgctgacaaacctgcgtgaggtagttggggaccgctttcattatccccacattcagaagaagagactgaggttcagagaagatgatcaggacttggacttcacacctcccaactgcaaagcctatggtgctctttcctccttatcactgcatccgtgcagtttggctactgggtacctacccaggggttctctgtcagttaatatgtgaattcagggctgctggaaaaagtgtgtggaactggtccaaaaagcatacaaagaaaatggaactgaagagagttattgacacaaataccagggagcctgtgtgtaagtgccgaaggctgcagggggctgagggcaaagaggtgcgcctgcttaaaatcggcaacggcctagttgtctgcagcactggccagagagccaggatgctgcagtcagagccggcaacaggaaacaggaagtcagctgcagggcagggcggggcttaggaagggagctggcacctgggccagggcctgcgggctggccagtgcccatgatagggaggcgggggctggtgcgtggagctgagcccgtgtgtgggtgtgaggtggggaggaaggggcagcctctaaggatgttgcagggtgacaagtgtgggtgtctgaggctggttcctgcctggttgccagcccagacagtcctgcagaggcctttgtccttcatgggtggttccggttggagccctgaagggagagtttctgcctttgcccacaaggccctggggggtgagtggccctgtggggctccatcccctatttactagcgatgcgtatttattcattgacgatttatacccaccaacttcctccagggttatttttgctcagagggagcactctgaggtcacctcctgctaagaataacccagaatgggagggaggaggaggagggggctgggcgctggtgctgagctcagctgagcccaagctggtgttagggctgaccctccaacaccgcaggagtgagccagtccaagagggcaaactgccccacttcagagcagatgacttggggtaacctaaatggggaagtcagggaaccattctgctgcaggcaaaagtcagctaggtacagcttatggcagctcttggaggtttgcagcactggctagctttccagcctgataggacctttgattcttctccaagttaagacagagctcagcagccctgcttgttttcagatcagagccgctcctgggctaaccctccggacctcggctgggtgatatggtgcccctaccttttatgcatataacttcctgacatcgtgtctcccactcctgggctgcagcccttggcccacccctagaggtggcttttcttcctgcgagcctgcatcagtacacgctgctgcccactctgtctcctcatgttttggaaggcatgaggaagacaggccgacacactgcttgtgaggtagagcctatggttatgaaccttgcagctccacccacccactccccgacctgagcggtgaaatcaacgcccgctactggagtgctgcatggaagggcctagcccatggtggggacttaagtgcagtgggactcctaaggatgccggggaagccagggaagatggaggaggtggggcttgacctgggccttagaagggaggtgacatttggagaagtcaaggggaaagtgagaggcacccccgaccccagctgagctgggtgtggaggaaggaaggcatgcagggcagggtgagtgtggggaggcccaaaggcaggggccatgagcacacaggcacaggcctggctgaggggactagggattcattgaaaaatgtatacggggctgggtgcaatggctcacacctgtaatcccaccactttgagaggctgaggcaggtggatcacttgaggccaggaattcgagaccagcctggccaacatggcaaaaccccatctctactaaaaatagaaaaaagccgaatgtggtggcacatacctgtggtcccagctgcccaggaggctgaggcacgagaatcgcttgaacctgggcaggcagaggttgcagtgagccgagattgtgccactgcactccagcctgggctacagagggagactctgtctcaaaaaaataaatttttatatatatatataataaatagtagctgggtatggtggtacacctgtggtcgcagctacttgggaggctaaggcaggaggatctcttgaccccgggaggttgaggctgcagtgagccataattgtgtcactgcactccagctgggtgacagagcaaaaccctgtctcaaagaaagaagaaaaatcttctcaatcttgattggaaaggtagtttgcaggcagcctgaggggcttttactctttatcctctctgaaaaatgtgttatctggaaggttgtgaggaggcggatatgacgtgatgggagtcgtgtttgagaaattggctctggcacccatgagcatggcgttcatccctgagcatgagcacatgctgggagaggggagggggcaggggcgccagcaaagtcccagggcctgtggggggtggcagtggcggggcagaattggccaagcctatgctgctggccctgggaacgctggagaggaaggggtgaaaggaagccctagcaatggcacaacagggacagcatcagcgttgttgtcagagacaaggcttctggaagggagcagatggggaaggggcccctgtcaaggccaccttacatagctggtcttacttggggagcatttaagtagaatctcagaatctcctttttttttttttccaaaaataatccctctgtttattttcatctctccacatcccagggccaccttcagcgagtcattcattcccacaggtcctggccttggtggccttcctggggccccatgagcttttctagggcccgggctccacctgcattgttcctcctgttgcaggtacgcgccggcacacccattggaggagagctgttgacatgggctttctttcatcatccccacctagagaattttgtacattttggttctcctacctcaagaaagacataagcgagttggaaaagctccagagaagggcactaaattgatcaaggggaaggcaaggctgccaagagaggacaggctaaagagattaggactccccagtctgcagagacaaaggcagaggatgtgattaaggctatgaaatcatgtcgggtgcggcgggctgagcacagcacagctggggggcagagggaggacacccattagaaatttcagaaagataaatgaagcacagaaaagatagcaccattttccatggtgggttcccttcttaccaaacctgtcaccctaggattggcagaaattgaaaacagaagcaacttcaaaagagatttacttaacgtatgggatctctcatacgtaatggcttttttgtttttgtttttgtttttgtttttgagacagagtctcactctgttgcccaggccggagtgcagtggtgcgatctcggctcactgcaacctttgcctcccgggttcaaacaattctcctgtctcagttttctgagtagctgggattacaggcgtgcaccaccatgcctggctaatttttttttttaagggtcgaagggatttattgaaaatgaaagtacactacacaatgtgagagcaggcctgagcatagggggctcaaaggccattttttttgtatttttagtagagatggggtttcaccatgttggccaggctggtctcgaactcccaacctcagatgatccgcccgcctcggcctcccaaagtgctgggattacaggcgtgagccactgaacccagccagcataatggctttttaaagggagcctccagctcactctgaaatcctttgaggttgacttcaaagagcacaaccaggcccttttccaggtggaccagtgtccccgctggaaacagaaccctgagtgggccggccactcaccacgcatggtcattctggcatccatttgccatggcttgtgacggcctagccaggccatggactgagtgacctctaaggctttgcagagcccagagttctctcctcagacacacgggtggagagatctctggggagaagggagacaggcagctcccagcagatgtggtaaggggaatggtaggacctggagggggtgcccaggctgggaccagagtttccagagtcggccctctgtggcctctggtcccgccatccctgaccccactggctgcgcttttagccaccccacagggaaaagggaaattggaggagtcagggtcctagctccatagcgttggagcttgctccatccaccccaggaaggccgagcaagggggcatctggggaccccctggcccctcctggagtgggcatggagcaggcatctctggctctccctaccacaggccacttccagctgctatcagatctctggtgagggccgccaggggaaagggggctgccggaagggcgggggcgggcagtcatggccccgtgccaatgcttcgggggcagagctgccctgcttacgtggacatgcagctgtttcctgaaactagagtcaacctggaaaaattcaggctggttgaggggtgatgggcctgcagagctgaggaactggaaggagcgaggagttgcggtgggagtggaggggctcactggcgtgtttgtgttggcatcacgcagcttccttgcacccctctgtcctgtggctggcagtgggtgtctgcaggcgtgggggtgcctccttctcaagtctgtgcacgtgacggtgaagagtccgtggctggcctgatgccagggttcccggttggcatggaatggatctcacagaggcattaaaagcaccatggcaggcccggccctctgggtgaccaaggtgaggtcgcccctgcatctgctgggctttgggggagaaggcaagaggagctcccagtgggaaaggaagaggcaggggaggagggagaatggcatctacccaccccccacccccacaggatcccccttccccggtgatcgctgcaggtgggctgcagcctggggacagggcttcttgccccaggtgccagggcctcatctcccctgtgccatgaccttcacctctcctcctcctggattttagtttttctgtgtaaataactatagtaaagcaacacttaaaaaccacttctggccgggcgtggtggctcacgcctgtaatctcagtactttgggaggccgaggtgggtggattacctgaggttgggagttcgagaccagcatggccaacatggcgaaaccccatctctactaaaaatacaaaaattagctggatgtggtggcacacgcctgtaatcccagctactagttgggactgaggcaggagaatcgcttgaacccgggaggcagacgttgtaatgagacgagatcacaccattgcactccagcctggagaacagagtgagactgcgtctcaaaaaaaaaaaaaaaaaatcacttccataaaattagctggatgtggtggcacatgccagtggtcccagctccttgggaggctgagataggaaaatcgttgaatttgaggctgcagggagctatggtcacacccctgcactccagcctgggcagcagagtgagaccttgtctcaaaaaaaaaattttttttaattacttccataaaaataaaaagttaggtgtggtggcaggcacctgtagtccctggtaaaactgaggcgggaagattgcttgagcccaggaattcagggccacagtgagccgtgatcgtgccaccgcactccaacctgagtgacaaagggatatcctgtctcttaaaaaaaagaaagaaaaaatcacctccccatattgggagtttcagacattgccccaccctgggacgcaaggctttgcctggagtgaaggaggggcaggaggtctgggtctggcccagactttgggcaaagggggaagaggaggcggcggcagggctggggaattggttccggctgggcaggccacagcagagggctcctccttgccttgcctctgtcttttgcttgaattgagcgctgctcaggggagggccagcagcctctgcccggcctttcttgggcactgcactgccacctctgccttctccaaaccctgggggcatttgtgagcttgcgcttttctgagactcaacccagagcgggagtcggccttcaaatgcctcgcctgtacctgagccatcctggaagctttactgatcagaggcgtgtgacccaaggcaggcctcagaaaagcgagtatcgctccagctcccctaggatccctgtgaaaattacatttattaattttataagcatatgtatgcccagtcctgtgtgggatgctagagagccataggtggagaggcctacaaagttaaataagattggccgggtgcggtggctcacgcctgtaatcccagcactttgggaggctgaggcggatggatcacctgggatcaggagtttgagaccagcctggccaacatggagaaaccccatctctaaaaatacaaaaattagccaggtgtggtggcaggcacctgtaatcccagctacttgggaggctgaggcaggagagtcgcttgaatccgggaggtggaggttgcagtgagccgagatcgcgccactgcactcgcctgggcaacagagcgagactcggtctcaaaaaaaaaaaaaaaagttaaataaggcaaggctcacagtcgaggagggaggccacagtaaacagataattagattcagaggtatgaattgtaaggagattgggtgagaaagggctttgtaaacaaacgtggcatgcattggctgggacaggagtgacagctgcggtgggttcacccccacccttcagggcaaggctgggccagcagctgtccacacctgccaactacagggggctgaggggtccagatccttccatttaaaggagcattcctttaaaatgctccttagaagacagaaagtagaagagtggtgactgggggagaggcaactgggaagttagtgttgaatggagacagtttccgtttgggatcgtggaaaagttctggagatggatgggggtaaaggttgtataaccatgagagtgtacttaaagtatgcttgaaaatggttaaaatggtaaatgttatgtatgttttaccccaggtttttagaagtttaaaaaagtgtttctaggccgggcacagtggcttacgcctgtaatcccagcactttgggaggctgaggtgggtggatcatgaagtcagaagttcaagaccagcctggccaagatggtgaaatcccatctctactaaaaatacaaaagttagccaggcatggtggcagtcagctgagataacaccactgcactccagcctggacaacagagcgagactccgtctcaaaaaaaaaagtgagcgatcttggctcactgcaagctctgcctcctaggttcacaccattctcctgctgcctccccagcagctgggactacaggcgcctgctaccacgcctggcgaattttttgtatttttagtagattcggggtttcaccatgttagccaggatggtctcaatctgctgacctcatgatccacccgcctcagccgcccaaagtgctgggattacaggcgtaagccaccatgcctggccaaaaaaagtgtttcttaagccaggcatggtggctcatgcctgtaatctcagcactttgggaggctgaggtgggtggatcacctgaggtcaggagtttgaatccagcctggacaacatggtgaaaccccatctttaccaaaaatacaaaaagttagccaagtgtaatagcagacacctgtaatcccagctacttgggaggctgaggcaggagaatcgcttgaacccaggaggtggaggttgtagtgagccgagattgcaccactgtgctccagactgggcaacaagagcgaaactccatctcaaaaaaaaaaaagtgttcctttgataaagacagtccctgtccttgcccctaccctcagcccagggtttttcaaagacattattgccattttgtctggactaaatctctgttgggggcgggggtgtcctctgtctggtggggtgtttagcagcttccctagcctctactcactagatgccagcacctcaccctaaccttgtggcagccaaaaatgtcttcacacacatgccaaaatgtcctggtggggagttagcaaaatcgccccagttgagaactacggccttaacctgcctcaaaaagctgctcacaggagaggactgaggaaaagccggaggcaaggtgggggttctgcccagaaggaaagcgaagattggcaaactcggagggaccccaggaagtggtgggcaggatttgaagacccaaagtgtggtataccgggtggggataggtggacagtgggtgataggaccaagctgtactgaaatctagaatgatactagattcacaaccctcctgtggcccccatctggccccccacgggaggagaagtgatgggtagttactgcggcttttcccattctgaaattgtcacctgcagctgcacctgctggtggtgccttctagaatggtcggcacccccaacccagccctctcccagataatgggcaacatgagtatctcgggggtgtgctgtgtctctttcaagatgactgtcaaaagcaaacaaaagcagattgtttaacagacatggcagcaaagctgaaactccctctagcttgagtgcaggaggttctcacttttagcctcgtctttgccattcacgaatcaattgtgaatattgtctgagcacctgtcaggtgccccactccctgctaagtctagccggatcgagcaaagtctctgccctccagatcgagcaaagtctctgccctccagaggtcaacaagctgtggagacaggggaaaggaggggaggagagtggctgggaggaggacatggagttgggggcagaagaggccaggcctggctggggtgcccctccctcctgggcttccaggctgaggtttctgcccttctcaccagggatggctccttcagtgagcacccagctcttccccagagacttggacagttgcttcaggccatttgactgggacctttttccttcctctggatggttttgtcctgctggtcaccctgagccccagagagccccattgaggggccacacttagcttgagggagttcttgatgggtaggatgaatcaagggttgagcgtggcagaagtcattgccctcccccccaaatcccagaactttggctgaatcatctcatccagaacctgagagagcaggtgagcaggaggggatggttgggcagaggatggtgtggaccagatgcgggagtggggatttcagcgggtgagctaacccggggctggaaatgtgcaacatgccccgctcgcccatcatctgcccagcatgcccggctcccacctggctttgggggcatctctgggagaatggcgcatctggtgctgttgcagactggggtccgcgggcaaggccagggcagggcttactcttgtgcatgaaggactgggttggtcgggagcctggggctgtgttgggcctcagagccggccctcataggtctctatgctacggagccagcagtcaacaggaagtgagtcccagcatgagaggaggccatgtggtcccaggcaggaagtgagtgacagtggagttgcctccagcagctttgcggggctcagagcctgccccaatctgaggtgtctgcagggcagcaaatgatgagaagaaaggaagacgcagccatgaaaaagtctggctctgacctaagcttcttagctcaagttagccaggcaggaccccacgcatacctcttatggtagtgccatgttgggggctttggggtacctggaacagctggatcccagaaggtggctgcagtgcaggggtacactccacttttcaggctgctggggctcatgactgagccttgaagggtgacagacagggtttacaccagggaggaccattctaggctggaaatgccctctttgcttaagcagggagggaggagaggtgttctgagttctggggagggtcctgacacacaggatggaggcaggggtctgccgttccactttccttcccggatttggccttcctggctctgctggcatcagcccaagcccccaagcacagtggaggacttctcgcttttaccagtcacctcctcttcctctcgttgcagccccctgcctccaactgctgaggagtacacacatgcagctttctgtgggtgcttccctcctggaagcaggcctgcccagctgccccgcacagcaggaaaggagcttggcaggccctgcagttccttctgctccctctccggctgctccctgtgcccgggtccccatccagggaggaaagcatacctgagaagactctggttttgtttttgtttttgttttcccaaggcccttgtccctaattgccacctctgggcgttccttgccaaataacagtgggttgagagttcaggtcctagaccgttagagcaaaagcagccttggaaatagggctttgcaggggaggggctggggacccagtgctgtctcaggctgtgcacttgagtggtgggaaactctggagggaatttggcagtatctctgcacatttagctggacaggccctttcacccggcctgaccacttctggaactccgtcccatggaaacacgcagctgtacagagctgtaagtgcaagggtgttcactgcagtgaaaagcaaatcagcccaaatgcccaccatcagggaacggcatgcatacattttggagcatccagatccatctgcactgggatggagggatgcccactctgcttgttaagtgaaaaagcaagttgcagaacattacgactagtatgatacccttttggaaaaaaacatttctggatctgaatgtgtatatgaatacatatgtataaacatgtaacttacacatgattgtcaatgcataggaaaaaatctggaaaggatgctcactgaactgttaataatgggtaccttaggggagagattttgggggtagggagctgaaataggagctttaaccttttagcattatttttttttttttgtatagtctttttttttttttttttttttagatggagtctcactctgttgcccaggctggagtgcagtggagcagtttcagctcactgcaacctctacctcctggattcaagtgattctcctgcctcagcctcccaaatagctgagatgacaggcatgcaccaccacacccagctaatttttagtagaaacagggttttgccatgttggccaggctggtctcaaactcctgacctcaggtgatatgtgagggagcctgcctcagcctcccaaagtgctaggattataggcgtaagccaccacgcctggctacagtttgatttttttatgatatatgtgactgacttttataagtagaaaaaaaaagacaagaaagacaaaatctccattggtctagaccagtcatctccacctgacaggtggggaaactgagatgctgagagcagtgccttccttatctgaggcttgccgtgctgatgctgtccctgcctttctactgggtaggtgttctgcatacggagccagcgaggcagagttgctgagtgcagcctggtgcctgtgggtgtggcagagtgccgagccatggggacccctgcctgttcctgtcccacactggacacctccattcttcttgaggtgtcctggcccacttgcctctggatggctgaggactgaatatatatacacagcagagcacacagcaggcacccggctctcctgctcttgctttgtccttgcaaagcctgtgacctggagcaaatcacaaaattccagagagcctcaggttcctcacctgcttcccagggaggctgagaaactctgaggaggtagtaagtgaggagctttgtccactgcgcagtgacacacacagacagccaggattattctttatttgatttttattacctggaaccttagcgagttcagttcttagactctaggggataaagaaatgatttcccttgaagggagaatgagagaccccagtgctcaggaagagttgttgcagagcctgaaaactgtttgccagagccttggctcttctgggtctgagtgcctgaaagaatctggggcggcccaggccaggggagaaggctacgctaggctatgagcctacagaatggttttttgggggtcctccttcgactctcatgcctcaagagaccaagaggaaagctgggagggcactgaccacagaagtcagaccagcctgagtcccagacttgatctggtggcactggaatcttctaagggagaggggggtcttattggattatgggtggcacaaggagcttttttttttttttttttttttgaggcggagtcttgctctgtcgcaaggctggagtgcaatggcgtgatctcggctcaccgcaaactctgcctcccaggttcaagcggttctcctgcctcagcctcccgagtacctgggattacgggcatgcaccaccatccccaactaactttgtatttttagtagagatggggtttctccatgttggccaggctgctcttaaactcccgacctcaagtgattcacctgcctcagcctcccaaagtgctgggattacaggtgtgagccaccacgcctggccggagcatttcttttttaacaggggctgcagagaaggcttggacgtcctatgtaacctcagtgagtggcggtgggatgggggagccgatcccttgagaagtgcaaccaggctggcaaacctgcttggattcttttcctgtttctgaagctggagtccacagactcgtgatttcaaggggtcaagcccaggaatcctttgatgttgaaagcaaaattgtgaatgtatctgtttgcatgaaggtttatatgaacacagtttctggacagaaagtgcataacattctctagaatttcagagcggtcaatgatccaaaacaggctaagcccactgatctaaccctcctcttgtgtatctttcttacatttgcaggtggaaagcggtgacacgccaaaggaccctgcggtgatctccaagtccccatccatggcccaggactcaggcgcctcagagctattacccaatggggacttggagaagcggagtgagccccagccagaggaggggagccctgctggggggcagaagggcggggccccagcagagggagagggtgcagctgagaccctgcctgaagcctcaagagcagtggaaaatggctgctgcacccccaaggagggccgaggagcccctgcagaagcgggtgagtcctcagcaccaggggcagcctcttctgggcccaccagcataccctgagagtcagggacttggctctccagcaggtcccaggaaggatggtctgggtcgtggctaaaggtctgcttgccaaggctatggcctggaggctactggctggatgcagcctgcgcatatgttttatttggcccatagagtgttttaaacatttaaaaaattagttgccagtatttaaaaatcaaaaaatttcacataaaaatctggagttttggcttctcatgaaaaaaaaaaaagctagatctggcaacagcgggctttcataacgccaacgattgctagactgggataatggcggtccctccatcgccttctgtggctggttgtgggccttagttttctgcagctctacctggcctgcttactctcccacgtgccatgcagttcctgggggttgctgtatttgtagcccctggcctgggcactcaagggcagcagataccctgtttgcctccctgagtgcagaggtcctgagcccaccctagttgggctgactcaactggaaatttggttgtgacagtggcgtggggagagggctgggtgattgtattctgtgtactgcccagcccaggcctcttcatctggggactttttggcctaaccctggaagcctggaaagttgcccacttttctctttcaggttaagccagcaatttcagggccaaccgagctgtaaacatgttagtaatgaggacaactagcatttgtacagggcttcacagtttacaaagcgctttctcatacattatcacatttgatcctcccagggccctgccaggttgttttgcatatgtgcattttaatttcaaaaagtcttccttccaagcgtgtatgatgaaatgagtaaattgattaattggcgtaacttattttgcatggatccaacctaatgttcatgcaggatagagaacatttccagaatacaaatttccaaacttattaagaagcttttattcatttattattcgacaaatatgtatgatgctcccactatgtgcagaacactacagagggaatctgtattagttgttttatttactcctctaacaatcttattcaagagatatgattatcctcatttcaggagaaaaatattgaggcttaaaacaatgatgtgacttgctcatggagccccaaccttaagtggcagatccagggctcattcagtcctggtcttgtgcctttctactattttccgctgtcctggaatgggacttggtgcggagacgggtcctgaattgtctaggcctcttgcacatattctgatacttcccgagagtgggaagggcctgaggggagtgaaacagatgaggaaagggagaagacaccatccttcccattaacaatgccaggtgtgtgagagaacccatcagccctgcccttccaaatgtggtgcttcccatgggctgactgcagttgacttcgcttcccaggaccccaccatgactcctgccgagctgctacccagggtcacggcattccttcctgccctgaagcatggagccatagccccaaagctgttctctggccttgagggtttgttttcactttgggatttccctacttccatttctagctgttctcaagggctcctgcatcgatcagtcaacaggtgtttcttaaaacacccattcagggtgtgctaggatccataccagggactggggaaactattatgaacaaaaacctgcttcttgccctcaaggacctcacagtcagctggagagacagacattaatgagaaatccacccttaaaaagatgagattacacatggagataagcgctctaagggaagtgaaacatgtccaggggaactgcaacgaagaacctgagttggcctgggctgtccagcgcgagctgaagggcgaagggagtccactgggtgaggggtagagggagagagtgagaacagggaagaaggctcccaggtgggagggagcagggcacccagggaactgatagatgtcacaaggctagagtgcagagagcaaaggagaagggtgtggaaagtgctggggcagacaggccaggccttcaaaggtggctgccggggtggggggtgggggggcggggggggggggggggggggggcggggagtgggcagtgtgtgtgatgtaatcagctttgcaatttgaaaagctcatgtcatctggatcctgggatggaatggaggagctgggaagcaggatgacatcggaggggctgatgagcaggatggcagcagagatgaagggaggggacaaatgccaggaacatgagaggtgagggagagatgctgtcaaggatgattcctgggtctgggactttcagacaggtggatcttccttagaatcttagtgctgagtgtggtgggcaaaaactctttaagtctccttgacctccaaaatttggccttgaggctgggcacagtggctcatgctggtaatcctagcactttgggaggcccaggcgggcagatgacttgaggtcaggagttcgagaccagccgggccaacacagtgaaaccttgtctctactaaaaatacaaaaaaaaattagtcgagcttggtggtgcatgcctgtagtcgcagctactccggagtctgagacaggagaatcacttaaacccgggaggtggaggttgcagtaagccaagattgtgccactgcactccagcctgggcaatagagtgagactccatctcaaaaaaatacaaaaaaaaaaaacaaactttggccttggtacactcctgtgtggtcccagctatccaggaagtatagattctggcagggatcagagctggtaggatccctgaaggccactgcactgcctggaagctgaaattggtgagatgttacctcgcggggtgggcagtggcctaggctctgccaatatgcaacggacagtggcttaatcagggtgtggaggctcggtcacggttccagcagtcagctgacatagaacacatgctcagctggttgattcagatgaggaaggagactaaggccccggagaggatgtggctcggccgtggtctcctttcagttccccttattccaggtctcttttcaggggatgctctcctggaacccctttcattagctcctgtacagcaaaaacagactttttaaggcagcgtttcttgtagcctgagcatgtgctgaaagtacagccaggagaaagaatcaggaagacgggagatgatgagatgagtgatagggacaggagccaacacccgacaggcctgtgcttgtcttgggtctgttcctgcccccgccagcattaatgccataatgatgatgattcaggtggcagtggcgatgtggctttcccttattgagtattgactgtattgggcattctctctcctcgctactcacagtggtccatagaccagcagtgttggcagcacccaggaatttagaaatgcagaattccaggctccactgaagacctgctggatcagaatctgcattttaaagagggcctcatgcttcccatgtatatgaaagtttcagaagctctgctgtgtattatgccccatgtgtgatcacgggaggaagatttttttttttttttgagacagcgtctcattcactctgtcgctcaggctggagtgcagtggcacaatcttggcttactgcaacctccacctcccaggttgaagcgattctcctgcctcagcctccggagtagctgggattacaggcgccagccaccatacctggttaatttttgtaattttagtagagacagggtttcgccatgttggccaggctggtcgtggactcctgatctcaagtgatctgcccaccttggccttccaaagtgctgagattacaggcatgagccactgcactcagcctggaagactcttattatcctcatttttcagatggggagactgaagcttcagaaaggttaaattacttacccaagattatgcaactggtgagagaccggattagggtcagcacaaaacccctctctactctgagcatagggccccttttcaggccagtgactgccctctgaggtaaacctggctacagcctggtcatggagatttgagttcattttaaagagaacttgggtggcctctggctgagtatagctcagactcgaaggcgagtgttagaagcaccctggcctcccctgcccccaagtcctgagatgcactagggtcatgttcgggcctgtcagggccacactggaaggtcacaaccacctggccctggcggtgaccctgggcctgggccaggagcagttgggctgcataggccgtactgagagagcagctgaccctccctgactcacgacaagtgccgcattccgaggcggcccggccaggctggaaagcgtgtgtctgtttgtgtgtgtgtgtgtgtgtgtgtgtgtgtgtgtgtgtgtgtgatcactcaagtgggcatgcgcagagtctgtcagggagaaaattccagaaagaagccagttggaaactgcatagggaaaaatcgttctgttttggggagcttggggggctgggaaattaggaagggggtcacattgagaaataacagtagtggtgcagcggagagggagcttgccggggcatcaggacccctgaaaagctcatctcagctccggccttaagtcactccaccccccaggtctcagctttctgcaaaatttaagtgctgaacaagtactcaatgatctctgcaaagcctttcaaccctgattttctaatattctaatgaataaataattatccgtaaaagtaattaaatgccatggagggtcccaagtaggaaacgtttgaggttctaaagcgggctggggagaaaatgcagtcggaagccccaagtccaggtccgagagccagcccgggggtcctccactccccgccctagccgcagggctgacacagtggttcccagcgccaccgcgagccccggagccccgccgcgtcagggtccgccgggaccgccaggccgcccccaggccgccacctgatcgcgagcaggcgccccctgctgggagcccggggcctcaccgggcagagcaacgaggtctgggaggagggggaagccctggcctgggaacggggaggccccggacaggctggagggggccccgcgaaaaaagtggggagctggctgtggtgggagagaggacggaaaggaaacagggaggcagagccagacaagatgggtgagacagcccttaaaaggccggtcacgaacaaagcgctggcgagtgcgcgcccgcccacgcgcacaggtgcccgcgacaagacgccccgtccccgcccacgcggcccccgcgggctgagcccggcgccaggcccgcacccacggtggccctcctgcctccctccccctggtgctcccgggcctagctagcgggagtcgctgtcaccagggacagaaccacggaggacagcgctgtcctgggcgcccggggtcagcccaaaaccagtccaggacccccctgtcacgagggaagggagtggcctcccgggctgaggacccgcggcgtgaacactgtggctggcttccgcttcacagccaggagatgaagtcggggctgttttttccgtttcaggctctttgtctccccccaccccaagctaccatgagccagccttagtgaccttcctgcagtgggcccaggcccgatacgctgtcggttcccgacaaagaagctcaggggcccaggtggaaggagggctcacttccccacctccagcaagaagctatgggaggcagaatcagccagccccgcagcctccggggcgctgggcctggaaggggtgcctggaaagggtggtgaggacctggtggggagtgcagggggatgcctgggaggagcgcagctcccctcatgctgggggcttggagaagcacagggagagggcaaggtctcaatagggaaattgagacttccctgccaggacctggaatcagggcccagtagaggaaatgaatccttagggaaggagaaccacactaacatgtattgagcacctacagtatgccaggccccacagtaggcacttaatgctcaccataacctaatgattttagaacatttatctaccttgattcagtgggaaaacaggccaggagaggttacagaggtcacactggaatccaaactcaagtcttctagattaaaggctgagctcaggggcctgagcatggggcagggagtggagggacggagaatgagattagtaatagaatcataatatttggacctgcaggcggaccttggaaatcgcatccagcatccttattttccagatgaggaaactgagtctcgtagagaggaagttgcttcaccggggtcttgttccagttggcccggtacccaccgccccccagtacatgcccttatgcccagaaggcctctgcaaacactcccttgcagggccagggaggccgctcaggctggccctctggcccaggccttcctgcaccccctcctccttccgcaccccctctgccttcctgctcctcctttggggaaggaggtctcttgactgggagcagcagaatgggggtatttttagtccccttctgtgtacctgagacagagttgacaggccagaaacccagctctgaatttcctcgtgttccctcttgcctgggcctcaaggcctgcccctgcccgagttctttctctgccctaggccctgctgggtcctcagggtcagcactgtgcctggcatgtggtgggccatcatatttaacacatgaacagctaaacggccagaggacccccatcccctgtggcagggaccccaggcacaaggtggggcctgtgagccactccagtaattctgccgaccaacgaactggtccctttgttcttccctctccacaggcaaagaacagaaggagaccaacatcgaatccatgaaaatggaggcaagtgttccacccccaggggctctgtggatcctgattctagaagaaggacacgggtggcgagtgtgtgtgagggggcggagggtgggcccctcctccttctttacacatccctctgtgggaaggagaggaagtgggcgtggaggttggaagtcccccaacaaggcagccggctcatccccctccagaggccagacgcctcccttcgtggcctgtggccgtgtccatgtgcccccccacccccgccacacatgcccctcgctcctccagcccacacggggcctgcccagcactcccaggggtgccctctctggccaggagccagtgtccacattgtgtttgaggcgagtgcctccttggtgggtccgtcagtgcccaccctaatgccctaatgtctgtctctctgtcctagggctcccggggccggctgcggggtggcttgggctgggagtccagcctccgtcagcggcccatgccgaggctcaccttccaggcgggggacccctactacatcagcaagcgcaagcgggacgagtggctggcacgctggaaaagggaggtgaggcgccttctggcctgggccccagcccgtcctgcagaactggaaaaccagaagtgatgggcctcagtttccccttcaggctaacccttagaacttactgggagcctcttaatctctagtcagtgatgactggttcatctgctccttcagcagatgcttattgaacacttactgtatacctggctgtgtactagaccctgggcgtatacggttcctgctctcatggagttgacattctgatgggggagacaggcagaacataaagaaacaaggggctgaaatagaagatagcagaggcctgctttagttggggtggtcaagacaggcttcttggaggaggtggcatttcagttaaggtctgaaggaaccgaagagctggctctgtgaggagtggggtcagggagagtgttctaggcagaggaaacagcaccagcaaggccttgacttgtttggcaaactgtatgccagggtgaaatggcaaaggagaaagggccagatgcagccagagaggcaggcggggctccacacatcagttggagacctgcagagtctgcccaaaagctggcttacttctgacaatactgggcagccatagaaggtttctgtgcacaggaaggatgtgatgtggatttgagaggcagcagtggagacagagaagagctttggggtgtattttggagctagaatagctagggcttgctgatggaccggcagggaggggaactggtggactcaaggaggactcacaggggtctggcctgaacacctggtgatggttgtgccatttgctcagatgggaagacccaggggaggatgagtttgggacaggtgggaattgagggctccgtgtgagatgccaggtgcctggagtctgggctgtagggaagtacgggcgacagaggtgggatttgagagcagaaccctggcatttaaatccatgggaacttaagggctcagcaaggggagaaggaggagagacgaagtctcagaacatgtccatgaaaaccccgacatttctgggccacatggagaggaggagtggcaggcagtagggactgagggagaaagcagtacagagcggtgtctggggaagcacggggttttcccagagggtggctgcccagccctagggaaagctgaattcactgagacatgcccatggcgttggacaacctggaaaggagctggtgactttatagagaagcttctgtgggggtcggggaggtgggaacagcccgtggagggcttcagccatgcagagaggtgagaaaatggaggctgaaagactgaggagggaaatcaactcgccacgcacaatttttgagctgtcttgtatgtttgattagtagagaactgggtacaaagagaagtgggtggtgacctagctgcacaggaaaagagaggaaactgccaccacgtggggcacttcacgtgaactcagctctcatttcgtctttaccccaggcctccaggggaaggcggccctgtttgtctgttcgcctttgtgtgagagctttctctagagaaagtgcagaacagaggccaggcgcggtggcttacacctgtaatctcagcactttgggaagctgaaaggaggtcaggagttcgagaccagcctggctagcttggtgaacccctgtctctaccaaaaatacaaaaaattagccaggcgtggtggctcatgcctgtaatcccagcactttgggaggctgaggcgggcggatcacctaaggtcaggagttcgagaccagtctgcccaacatggcaaaaccctgtttctactaaaaagacaaaaaattagccgggcatggtggcaggcgcctgtaatcccagctactcaggagactgaggcaggagaatcacttgaacccgggaggcggaggttgcagtgagctgagatcacaccactacactccagcctggacaacaagagcaaaactctgtctcaaaaaaaaaaaaaatacaaacaattagccaggtgtggtggtgcgtgcctatagtcccagctactcaagaggctgaggcaggagaattgcttgaacccgacaggtggaggttgcggtgaggcgagattgagccactgcactccagcctgggcaacagagcaaaattccgtctcaaaaaaaaaaaaaaaagagaaagtgcagaacagggtgggggttctggctgcttgattgttttcttttcctctgggatccaggaaggcagaaattactttcccggaagagcccggagaaagggcagcctgtctgaggtctgggaggagaggcacttacccctgtgcgtggaatgttgtgtttggggtggaaattcaggaatggggctcttctctccaagtcagtcgctgcactcctgggttccccgcaacccagaaacaggggctttgctttttagctcctggttctgtgagcgaagtgtttctgttctcatttagccctggggcaagaagcttagactatgacttttaggaaccggaagaactttcagaaattccatgattctcaaactctgctcccttgaagaagcagtatggaggcctgccctcagttacagtgaaaaaaagggttctttcctcaactcccaggaaaaattagatcatagatacattttctcaattttaggtctctactaaaatttaaaaagacttttttgggctggacgcagtggctcacacctgtaaccccagcacttcgggaggccgaggcgggtggatcaccttaggtcaggagtttgagaccagcctggccaacatgttgaaaccccatctgtactacaaatacaaaaattagctgggcatagtggcgggcacctgtaatcccagctacttgggaggctgaggcaggagaatcactggaacccaggaggcagaggttgcagtgagccgagattgtgccactgcactccagcctgggtgacagaacgagactctgtctcaaaaaaacaaaacagactttgtaaaactcatgaacattttctaacatatgcagaagcagagagtagtgtaacgacctcccattgccatcacctggctccagcaattatcaaaagattttctagtaagtcttcaacccttggcatttgcatccccactcccaaccaatgaaggtagcagtgggcattattagaaaaaccaaaatgttgatttaatttaaaagactttagtacacttgacttgcaatgtggagatctccaaacaaaatatattttctgctaataacattattccttattcctatgctgtaattaaagaatccatgaattccagtacaagttttagaactactgatctcattttcagactaggggacttggggctaccgagttttataactggccacaagctcccaatgaagaattgggaacaggactagaatggaattagaatttacgtttcctattccaatgtggggcccaggccctgactgtcacacagtctcctcctgggctatgcctggggttaggaaggggctagatgcaggtatcaagaatggggaaaacacaggtagctttcaagattcccaagtcgccctcagactcaagagtagtagctgttgctatcaggcctgttttctttgtttgtctgtttttgagacggagtttcactcttgttgtcaaggctggagtgcaaaggctggagtgcaatggctcactgcagcctccgcctcctgggttgaggcgattctcctgcctcagcctcccgagtggctgggatcacaggcacctgctgacacacccggctaactttttgtatttttagtagagatgggggtttcaccatgttggtcaggctggtcttgaactcttgacctcaggtgatctgcccgccttggcctcccgaagtgctgggattacaggcatgaatcactgcacccggcctatcaggcctgtttttgttttttggtttttgtttttttgagacggagtttcgcacttgttgcccaagctggagtgcaatggcacaatctcagctcactgcaacctccatctcccaggttcaagcgattctcctgcctcagcctcccgagtagctgggattacaggcgtgcaccaccacacccggctaattttttgtaatgttttctaagtggtgtaacaacagcacagacatttctcctcttttctcagtctcattttgctctctgacatttgagcccttctgaaactgcctccctgggccttcccaaggccgctgcaggttcctccccacctccttcagctgatctcaagcggcaacctctgttagctgcatccccagatctccaccccccaccctctgccagtgttgatccactgaccccttacccaccctcctagatccaagtaccctcctcctcccaaaaaaggcacctcccctcctgacaaaccacccagccttcaggacccagctccagctgttccccaggcaatatcacttgaagggccagccagcgcttcctaatctcagaatgcaacgcctgcaacctttcattcagggcacctttactgagccggtttccagaagcctccacagctgagtgacatgtaagatactgggactaccagaggcatagaggattcctagttttcccatgataggatgagggctcatagcacctgcagaaagagctgccctgaatggggcgtagacgaatgctgcctggggtcatctacgcatcagcaggggtggcttctggcttttgacggttgaactggaatttaggggagggctgaggaaggcatttcagagggaggaatacagcaggcacatacctctcgaggcacaagacacttgggcttttcaggaatgggagtttgttgtggtggtgcacagcgggtgtgggcagaaagcagctaggaaatgtggctggaaggtggggcaggggccagaaggaggagctgccaccagaccccaggctgcaccagcccttcccctaggctgtgtgccccacctggggggcttcttccctgggaacgcactccccagcttaacttccttctccttgcccacccttgttggaccacagttactgagtgagcctctcccagattacccccttcaggctttccctcccccaagatttaagacgactcagaatgtcacaaaatgaaagaaatggaaaataagtgaacggggaaaatgagacatttctgcagtccctgaggctgaagtgagaattcctgctggagctgggaaggaagttgttgtcttctgtctgttccatctcctgttgctgttccttcacctgcttactagtcctgtaaggactaagctctgttttaatcatgatcacaccctgccatagaacctccaatggctccccattgtctcccccatcatgtcagataccctctggctatttctcaagtcttcaacccttcgacctccacaatcagcccaccccactttcactacagtcctctaatagaagggtgtcccctaggaagggacattgccatgctccttccttccttcctgtcatcgttcctgctgtgatttccccagtccattcttcagggttgaggccaagagctgctgcctcctccaggaaggtttccaagatttctccagtccacaatgacctcttcccttccctgaatccctgtaaccctcactggggtttgtttgtttgtctgagacagtttcactctgtctcccaggctggggtgcagtggtgcagtctcttggctcactgcaacctccacctcccaggttcaagtgattctcgtgcctcgcctcagccttcccagtagctggaattacaggcacgcaccaccacacccagctaatttttatattttaagtagagatggggttttgctatgttgacctggctggtctcgaactcctgaccccaagtgatccgcctgctttggcctcccaaagtactggaattacaggcatgagccactgcactcagactgtccttacggttaatattacttagcactcaatcatatttcatcagggtatttttcactgtttcttatgtgttgatcacatcttcctctgtctggcctaatgcaatgggcagggagaacaggcccagtgaatacctgctggctggctaagcagttgggaggtaggtgaatgtgggaccacttctctgggaacatgagatcttagatttccaccatgacaagggcccacacacttgatttcgaggtggtttttccaggggtgctgacaggtgtacctggaggatggcatggggactggtatggacagcctccatgggtaaaggggggccagagtctcctccatcctgtattcctgccattctcaccaggcttctgagctgaggagaaccttccttggcctggcagagctggccagggctgtggggagggcagggtagggcagttcctcctcccaaaggaaggcactcccttagctcctcttccttctaattctcagagcaaaatgcactctgatggagggcttgagggttaggaagggcctctcgcttcattagccctccctgtagctctgcaaggcagatgagcacagagacccagggtcagtagctgggcggtcatctcgcctgggaagccactcactccagtttgtgtcgcggctggtggttttaggactcagttacagcacattgatggcatgactcgctcattaatctcttcaccccagccggattctaaattccgtctaggcagcgggtaccatgtcctattgttctaggatctggtctctttcctgcttccgacctgaaggtagggacccttgactcatgcatccttatacttattagatgcttaataatattgaatagtgataatgaaacatctgtgactggaacgtcatagtctctcctcccttccctcgccacactgagatacaacccactccctccgcccagggctgcccagcagatagcagagccttcatggaccttaagggttggctgctgtttactgcgacctttggaggcaagttcaaatactgccttaagaaaggtcccacttactgggtgtgggaccttaggcatcacttaccctgtaccccagctgaggttcctcctctgtggatggacttggctgtactctgcatctccatgacagcagcactcgccagcttgttttctgcctctacccatttctgcatttaagctcgttcaatacaggcattctgggcaccccctgcccccagggctggcatgtgggaggtgcagggtgaaagtgtgctgaatgaatgaacaattcttatctcagagttgtgtggacaacacacaacatttaaagctcctagcacagagctagcatataataggaactttataattttttagaaagtattttaaattacataagtattacacaaatacattcttgtgaaaaagtccgcccaaacttgccaccccaaaattttattttgagacagggtcctgctccattggccaggctggagtacaatggcatgatcatggctcactgcagcctcaacttcttggctcaggtgatcctcccacctaagcctcctgagtagctgggaccacaggcatgtgccaccacacttggctaatttttaaattttttgtagagatgggggtctccttatgttgaccaggctggctttgaactcctgggctcaagcagtccttttgcctccacctcccaaagtactgggattacaggcatgagccaccacacctggcctgaaaatttaattccttcaccagaaatacttgatgctatcagtttggtgtaacgtcatgattttttcctatccgtgtgtatgcgtgtaaatatataattttgcttcaggggttctttttttcctgttctttttacacaaatggaaccacactgtagtttcattttacagcttggtttttgacttccaataagtctgtgcaatctagccacgtaattactattatattccaccatgtggattcccatggttttatttagccattctgttattggtggccatttatgttgtttatgatattttactgtttagcattgcagcggtgaacatccttagtcatacctctttgtgcatctgtttctctaagacagatacctagaaagaaaaaggcctagctgaagggaatgtgcattttacattttatgacatctgccaaactgccctctaaaaagggcactccaatttatgcttctgtgaacagggtatgagaagacctttgccaacatcaatattttgctagtcaaatgggtgggaaaatagtatcttgttatgcttttaattggcatttcccagataataaggttgaacatcttttcctatgtttattggccatttgtgctgctgcttctatgagcttagcaaatgttgcctcctctgactttacaaccctgcagtctcaacagactgtgcttcctgtctgccctgaggagagcaggccatgaatgtccagaaggtcccccatgctgtgtcatattccatttaataagcagtcactcagcacctactaagtaaaggggccttgtgctaggggctatgggaaggaggagataataaggtgtgatctcctgggctttagtctagttcaggagaaatggaagtgcaaagtagaccagtaaaggctcaaaacaaattattagccaactgtatgggaagcagttttagagcatttggactggaagacattcctcacttatttgccctacctgaccttttgcagcgtggcctcaaaaataacatcacccttgaaggagatgatgatgtttggagtaggcacagcaagtatactttacccaaggctgaacaagttctagaggctcccatgacagcctgtaagcagtagtgacttcgagggctggcctttaccataggctactaaagttgccacagagggactccccattgtcctttaagtagatgggttggttgcgcaccagagtcttcacttctggggcacagagagaacagctcttagaacaacccctactttttagtggtgagaaaaaaagaggcagggtggggtaggtgactagttgctggcccagggccaactcctggccacagcaaagcctgaaccagggaaagggtgttgaacttcactgagcacctactttacatcaggcactatgccaggagcattagctttcaccacaatcctaaaacatattatctgcatttaatgtcttttttttttttttgagatggagtcttactctgtcacccagtctgaagtgcagtggcatgatctcagctcactgcaacctctgcctcttgggttcaagcgattctcctgccccagcctcccaagtagctaggattacaggcacctgccaccacacccggctaattttttgtatttttaggagagatggggtttcaccatgttggccaggctggtcttgaactcctgacctcaggtgatccacctgcctcagcctccaaagtgctgggattacaggcatgagccaccgcgcccggccagaagtatttttttaacctgtattttgctattagaaaattaagatttatctaggtaagtaggttgcggccacatgggtatcctgatggagtggcccaatgggcaaaactagactccaaatctcgtgttgcttctgttgtgtacccaaatgactaacctacactcccagttttcctggtttcctggcttggaaattgtcatgaaattgaagaatgcatttagaagagagggagagagctggcccggctttccagcctgccgcatgctcttcccgcccccggcctgcagttgttggggctgctccccatgcctctttgccaggaggctcaggtccctttcagcctccccgaccacccctccctgctctactcatgtggtcctgaacccttgcccttgaattgctgttttttcatgaccatgtggatgatgttgtgaaactggattaagaaaatgttggaatgagatttgggaggcctggtttctcgtctcagcttctgcccctccttagctatggatgtgaggaggtctttctgctttcggcattttagtttcctggtttataatgcgacagaaatagatgagatgaccccagagattctaaaattccatcacggcaggttggggggtgagactggaatcatgatctgcactctctttattacctagattaccttgtacataaattctaaattaaatatttgagtgaattctcagacctcgcatatacgtctcttctaaaggcacatacgtgaagcatccttataaaaactctttttggccgggggtggtggctcacgcctgtaatcccagcactttgggaggcgaaggcaggcgtatcatgaggtcagcagatcgagaccatcctggctaacatggtgaaaccccatctctactaaaaatacaaaaaattagccgggcgtggtggcaggcacctcccagctactcgggaggctgaggcaggagaatggcgtgaacccgggaggcggagcttgcagtgagccgagatcgcaccactgcactccagcctgggcgacagagccagactctgtctcacaaaaaaaaacaaaacaaaaaactctttttaaaaaaaaaacctttggcccagcacagtggctcacgcctgtaatcccaacactgtgggaggccaaggcgggtggatctcttgaggccaggaattcgagaccagtctggctaacatggtgaaacgccgtctctactgaaaatacaaaaattagctgggcgtggtggcacatgcctgtaatcccagctacttggaaggctgaggcacaagaatcgtttgagccagggtggtggaggttgcagtgagtcaagattgcgccactgcactccagcctgggcgacagagcgagaccttgtctcaaaaaaaaaaaaaaaaaaaaaaaaaccaaagggttgtccagcctttactgagcagatactgtgtgctcagtctttaagataccaccttgtgtgtctgggtgtctactatgttccaacattttctagacactaaggaagcaaatttaaaggcaagtcagaattctaccctcccctgtgagaggttggtaggtaaatgaatgaattgtgctgtagccagggcagggttgttttagaaatactaagggaaggactgtgcaagcaactccctagccctgcctaagggcctcagggaaggcggtgcctagggagaggcagtgtaccgccattgacctgaacaggactgcttggcagggacagtgggggaagggcatggagtggggtcctaagggaggtggtcaaagaaatcctctaggagtttggagtctagagtgcctcaaagtttttcccatagcactgtctatggggctgacaaagcagaaaatataatagccaatgttctctctgctttaaaaaccagactgcttgtcagggaggccgtgggatgttcacatatggggtggtctgccagagccctctgccgctttattaagaggccagtacactcgttaaaggagttaatggacctcagtacttactactgattgcttagtaattcagtacttggtaaataaacatgatactatgctagtggcggggtagggggagaccaattggatatagtccctgtcccagaggcacacattgtcaagtggaggaggcaggaatgtttccaacaagcctcagtggcagtcagagcgtggggcttgctctgtgctcctgtgtaaagagcccaacatgaagcataaaggagcatgagagcagcttctggaggactccaggaaagcttcctggaggaggcaggcatcctttgagaatttcagtaagtgcaaaagaggctgggtgcagtgtaatcccagcactttgggagaccaaagtgggaggattgcttgagcccaggagttcaagagcagcctgggcaacatggccagacccactctctacaaaaaaaatatttaattagctgggcatggtgttgtgcaccaatggtcccagctactcaggaggctgaggtcgaggctgcagtgagccatgatcatgccactggactccagcctgggtgacagagtgagatactatctcaataaattataaacaaacaaataaaaaagtgttaaagaggaggaaggcatttcaggaaaaggaactactgagggcaaagagaaggaggcatgacttctgggttgtttagggagtagtaagagatctggtaactagggtgcaggggttagggaggatgggcaagaagagacagaactagaaagcaagatggtcacatcctcagtggtcttcctgccatagtgagaaatttaggcttcgttgtccagtggagagcaggggtggaagagaattggacacatagtttaggaagataacctggcaggacaataagtattccccagagagaggaagtttagaagcaggaccaggtaggagaacattacatttggccttgactgagggttgaggtaatgagaggcaaacttgaaggaattgctagaactggtcctggttggaggggagggaaaaatttgtctggtattgggagctgggctggggatagggttcattatctgaggtagagaatcttggaggaagagcaggtttgaggcaggatgatacagtgaacttttcattttcttatgtattctgatgagcagaagtttttaataaagtccaacttacccatttttttcctttattggttagtgtttgtgtgtgttatctctaagaattctctgtctaccgcaaggtctttaagatattttctcttaggagggggtggatttttgagctagggtttggataagctgcttttgagaagccagcagattggtgtcaatggggacaggttttttttttttttttttttgagacggagtcttgctctctcgccaggctggagtgcagtggcacaatctcagctcactgcaacccttgactccctggttcaagtgattctcctgcctcagcctcccgagtaggtggggttacaggcatgtgctgccatgcccagctaatttttgtatttttagtagagacggggtggggtttcaccatgttggccaggatggtcttgatctcctgatctcatgatctgcccaccttggcctcccaaagtgctgggattacaggtgtgagccactgcgcccgaccccaggggacaggtttagtcagattccagggtggtcctcatggaggggacgcacaggcaggagggcagggagagaaagcacagaaagcagacctgctaggagaggaccaggatagggaggggcagggacaaggacatgggacttctgggagcaggtggccgggggtcaacgtccaggaggatttcctgaaccagttagaggactactgaacccccctttcacctatctatgcagccctttacttttacaatatatacatttctatttattttatttatttatggttttttttttttttgagacggagtctcactctgtcacccaggctggagtgcagaggtgtgatctcggctcacttcaacctccgcctcctgggttcaagcaatcctcccacctcagcctcccaagtagctgggattataggtgtccgcccccacctctggcttttttttttttttttttttttgagacagagtctcactctgtcacccaggctggagtgcagtggcatggtcttggctcactgcaacctctgcctcccgggttcaagtgattctcctgcctcagcctcctgagtagctgggactataggcacacgccaccatgcctggctaatttttgtaattttagtggagacggggtttcaccatgttggccaggctagtctcaaactcctgagctcagatgatccacccacctcagcctcccaaagtgctgggattacaggcatgagccaccacacttggccacctctggctaatttttgtatttttagtagagatgggttttcaccatgttggccaggctggtctcgaactcctgacctcaagtgatctgcccacctcggcctcccaaagtgctggaattacaggcgtgagccatcatgccgggcctacgttaatttttgagacagagtcttgctctgtcgcccaggctggagtgcagtggcatgctctgatcgtagctcactgcagccttggactcttgggctcaagtgatcctcccacctcagcttcccaagtagctggaattacaggcacgtgccaccatgccctctgtggagccctttctgacttccatcaactccctgcgaccaccccgcatccttcacctctcagtccgcactccctcccaggccaactgcatggtgagtgtgtgtgtgtgctcccaggccaactgcatggtgagtgtgtgtgtgtgcaagtgtgcgtgtgaatgttaccatttttctgacttgccattcttcagtagcaactctacagatgcgacagctcttccccgttcctctttagtccatgaatggtgggcagtataaatattattttcacttgcaactcagatggattgaacaaaaacaggaataacagctcagcctcctgtatatttgacgctagatgctgttggaaaggcagctttgtggggcaaaaaaaaacaaaaattgagtgagcttgcttatatataccaaagatgctcttagacttcaatgtttctcaaagggtgagattgtgtgttacctcaccagaaccacctgggcagtgcattaaaaaggcacactcctggagcagaagctctgggacagtacttgtaggtttgattttctagccagcccccagatgattctggggcttactacagcttgaaaaccaccaagcttcagatgattagaggtaaaccaaatctggcacagatgagattcccacacagatgtattggtagatgcatttattgtatcgcctgcattggcggcgggggtctctctacacattttgtttaaacctgggccaggttaatcacgttgggaatctagtgatgtacccagcaagggtggtttcccaagctctccgggtaattgatagggcttgggttgccagtctgattgtggtaacaagcaaaggaagaagtagggactgtaaggcgggcagacctagggaacagtttccaaacagggttgggggggaaagaccggaaaggacttggtacaggaatttaaatgtttcctttcggatggagatggcaggggtcctgctgttttcagcaatagttaccgcagtgcctgtctgctgggctcctctggagtcttctctttggaccctgaaacttgagagggtctgcatgcctgaatctgaatgcggctcctttaggcccctccctttgacccctggagcctggagaaggggtgggggaagggtggggaaaacaggcctggctgttaaggtttaccaggttccttttggccacaccccccttagtataaacttaacacttctctccagggtccagtttctaaagcaaagtgacagcatcgacacgtccctaaagcaaacttgtcatgaagtccctcacctctcaaatgtgagtccctcctggcttcctttgattttatctgtaatatttagcagatacgtgtgattctattaggctagttaggaaaccaaggcccaaagaagctaggggttatttaaggtcttgtcatcagctgtaaaacaccctgctcagcgccctgctcagtgaaagacctggcatcccctcccagttgaatttcctggtaaggggcacctgagatccggtatcagtggggtactgctactctcccacccctgccctggcatctctgctccctggccccagactccgtcactggtagagctgggcagacccagcagttccaggatagcgggtggaagtgagcaggaaggaagagctgggtttgtggagaagccttccccttatggggcaggctatagggaaagggaaggcagccaccaaagctccagagcctgatggcgcatctattgggctgggacttcccagcatacaccattagggaagtgtagggttggctgggagagaacgagggagccaggggctctgggatagaggtggggagagaaggggaggtgagggtatcagcaagagggaagttgggctttcctttccagcagttgggctcccccatcctgcatcttcctccttgatttagaagaattcatctagagtgtcagtgcaaaaagccccttaccactccccctccctaacagataccctaaggctgtgcttgtgcttttcattcctgccattcatctgccaggaagctcatgcagttacagatgccccctagatctggccattcctgtctgaaaaacctgggaggttgtgcccattcctagtttccgctctttcatcttcccttgagccttcctgccttgactgatcccagctgcctctgagttccttcggcacatgtagaaagcatccctaccacataatttaccatctaattgcatgctgtcttgaatgagggctgtggtttcatgtgtggtgggtcttgggtacacaattaggctgtgagtaacagaggcctagagccccatcatgtctactagctcttgcacctctttgcttcccttccccccagcctacctactgcaggtgctaaggactgactgacctgatccggtgtttaggtgagcttcaggcaggctcccaggataaagcacaattcgcttacaggttctaaaaccagactgctcagtgcaggggttaggggggtgcccctgcccgacagcatttgcccaaatgccgctcctctccccagactcagggaggaggttctggggcagggcccaggtttggggtgatggcatagagcccaaccaggcagcacactgcagttgccatggtgacccttttgcttttcttcaggaggatggatttctcttttagcccaaatcatctgcctgggctactctgagaaccagattcctagccccctaccttccacattctaccacagggggcagcttgtcagaggctttggtttgaaatcacagtccagcatcagacagcaacaggttgtgcttgatcagggagcaggtgggaaaggcccagaggagggctcacctgggacgcatgccccgagggagctgacctccatctccttctgcttcccctcctctctccagaccacttctctccagtgaattgctctgacctttcaggtgggctcgggcctctctaggcctcagtgttctcatttgtaacagacacagccagggtctccgtgtttccacacctggctagtattagaattacccagggaggttttaatagattcctgggccccaccttaagcccgctgatctacgtaggtagaccccaagaatctgtatttttaaagccctccttgggtgatccagatgcaattaaaccaaagtgaatctggggttctcctggcgaggtgattagcaaggccctcgtgaaaagaaaggaagttctgcctgtgctaaggattgactggcctctccgggcttccaggagcttctggagagccccttacagcctagtcttgtcaggaagcgggtgtttcctggtcatgccggctaagccaagaccagacccccacttctctccctccagagaagccaggagagagagaatgacaggaaggggggatgttgccataacaacaagctccaagcagaggcctcccttccaggggctggtacttcaccccagtcctggtggtttccatggagatgggttactgagggacagggggaatgtctgccccacttagagcatcagccaggagctgccagaaggcagaacaccgctaggtgcgagcctttggacccctctgctctccgggtgcacatctgacaccttccccctgcttagttgctctctctgcgactggtctccttagcaacaagtcctgctaactccacgctgttggcttcatggctatttttagcttcactgccagcagcccagtcctggtcatttgcttgcaacctccatatggattgcaagggaataggaaaacaaagattcccagcctcttttggtagactgggacctcgtagcaacgattagaattcctgctatgaaatggatccattccccaacttggaacttgggcagtggatttgggataaggttcctgagacaacactgcattcagttcatttttaatcctctactatgggcaagatgctctagcccacactgcttccatacgaaggtgaatgaggtccagtccctgccctctaggaatatttaatcttgtaaaggagaaagatgagtacacaatcaccttcgcacaaggcaaagactggcaggtcctaacagaggcttacaaagtacaaggggagtgtggcagggatggggtagaagataagggacagaagggaaagataagggacagaagggaaagataagggacagaaggggaggataagggtgaggggccagggcagcactgtcaaaagaactttctgggatgatggcaatgttttaaaatcagtgccatcgaattcagtagcccccagccacatgtggctcttggacacttggaatgtagccagtgtgactgaggaactaaattttaatttgtatttaattcaaatagacacatgcagccagtaactgccatcctggacagtgcaaggctagaggaactttcatggtggaggtcactggcggactggtgtagaaggatatgcagggtttaggtggtgaaagttgaaggggaggaaccttccaggaagaaggaacagcatgaggaatagcaagtgggcgggcaaagcgtgggcttcatgatatcacacggaggcctccagattcgtgggggcctagaatgtcacgcagagtgttgactgattggcattgaggcttttgagctgtaggtgggaggaggacgggttcagaacagacatccatcctgacctctctttttgtctggatcaggtctccctggtcttggggttggtgggaatacgtgtggggtggaaatacgtgtgcagtgacttcatatgtgttgctttgcagatggctttatagggaccatggcttctctgattcagagtagagagactcgcatggtaaatgtcctggtgggatgacagcaacatcatctaccctcatcctgccggaactggattttatgacagagcatgccacagagcactgaactttgagtaaaacgtcaggcatgagctccgggcgttgctgctctttggagaggtatcatgatgggctagtgtctcgtctcaattctttgaggctggaaagtcacattaacatacttatgatcatgactcttcaatgacccaggagaatgatgcaccccagaatgttagatttaccaattgataacaggacatgtccttgccacacaaatcataatgcttgtcctgctgttttctggcaacttactggtatcagagtcattggaaaatgtaattaaaattggaagtttgcttgatgaatacaggatcagggcagagaggtgtccttcagaggtatttttgtcgggcttaggaggcctatgggatcactgttgtctgcccaccaaacaggaactgtgctctcattctcaggtcactctctccattggaccacactggatacttcctttccagcacctcttttaggctcttgacatccagcatattttcttctcatccaggagttcctcctttcaacatacttttataacaaatccaagaacatggcttattttacatggtgctgctatttgagtttggctatctttaactcaaacaaaagacctatctggtaaactaccagggaggtttactttggaagctcaagagcatgtgtgacctgaggatccttgaagattgccccattttagtaaggggatttttccttttactaaaatcacccctgctctagatcttggggtctcttctgctttggggtctgactgtgcattgaccacaaagaagacacatctctgtttaagcgactcagtctagaaaaggcagtgtttcctgtctgcatagttacaggagagggaagaaagatgctctgggttgttaaggggacacctttgagcctaggcttccttttgcttgttgggaagttgtgtggaagaggtaggatttgactttaatgttaaaggatgagaataaggaagtttgacggccggagggaacagctacctaatatgtggccaagagaaagtgaacagttctggccagttctgacaccttgagtccttgctgcacgcacggcatcattgcagtcttatgtcccaagaccacagaatgtggagtctaaggtgtttagccgcattataatggaagagcgggtatcgtacatgagacagtgtctgcaaaaggccaccaagccagaaccagaaacttcttttgagaggaggcctgaagtaagttctcaggcccgttgaccggcatggatgcagaagaggtatcagtgagagaagcagcgaagcaagtcatgctgcattccctaaaggttgggagcaggcaagagggacaaattctgggcttctcacttctgcttggggagcccctggaaatgtgtaccaggcaaataccttagttgggttgaaagatgggttggaacagaagagggcctgtgtttttgtttgtttgcttgtttttcgaatagcttcttttcctagctgtatggattctgggtctcagggttgggggggagtctgtacccaagtcttctaggtagaaggctctctggtttggggtccttgctcttcagggtttgcttgctctgatggccctcagggggagggggggctccctcactgcacatctcgtgacttcattataccagcacctgtatgtcccaggtgactgtggctgggagccaggcacctagagaattgtctcattgtcattaggagatggtggcgttccatggccaaagagggctgatgtcatcactcgttttgcagatgagacaacagatttcttgggggttaagtgacttgtttaaggtcatggtggtggaaacagaactgaagtccagatcttttttttttttttttttgagacggagtctcgctctgttgcccaggctggagtgcagtggcatgatctcggctcactgcaacatccgcctcctaagttgaagcgattctcttgcctcagcctcccaagtagctgggattactggcgcacgccaccacgcctggctaatttttgtatttttagtagagacaaggtttcaccatgttagtcaggccggtctcaaactcctgacctcatgatccgcctgcctcagccttccaaagtgctgggattataggcgtgagccaccgcgctcggccaagtccagatcttctaacaagtgccgctgcccaaatagccctctgctgtggggtgcattttcctccatttcctcagttcttccttctaattcatcttgccaacggcaactaggctgatttttccaaaatactcattcatcttgtcagaaaacctgcggttattcttccctgctacagaatatacccaaggacgcacctgaaggcttgccattaccttgccctgtcgtgtactgggagggtggaggtgggcgagggtctcctccctccccagcccggcagctcttgctcatcctacccatctcacctcattccaagtccgatccagcctccaggcccagtcggctcacctggaactgacctctgacctcttttgtcatccatgccgcccatttttttctacttggtatttgtggcatagttacctttacatatgtttgttttacagtgatcctttcatatttctccaagtctagtggaatcttcaacccctcgagggcagagccaacagggtctatttctttatctgatcctacagccaacgtaatggagggctgtgggtggggactgcgtctgccttgggggtaggtgcctttgttcaggaggaggaagcttgaaatggcggaggctgcacctggaggccgcacctggaggccccaggagaggagtcaggtcttctcgatctgcagatgtttgagcctgggaatgaaggaattgctgaactttctgaaggagcgccctcgccgcgaccaaccttgcaaacaggaaaatgagaaatccagggaaggcccagagtgacgcaggggccctgggactcgaagcctgacctcctcacgccgcgctttttgaggcccccccgcttctctattcacctgtagtgtggaggcgggagaccccccaaacaatccccgatctggagcgctcccaatgcctgcgcgcgcctgctgtcactctccgtctgtgtgctgagttttcctacagcttcctgggcctcctatctgtaagctttttctttttttttttttggttgtgcttcagagaaactcacttttcacaactttctcccggctctcccaggccgtccgaaagctccggcttgctttcgcccggacccccggctccctccgggcaggcggctcgggagcagccccttccctcccctcccggccccccggccccgcgctaatctcttccagagctgggggaggggccaggcggtcttcccgaaggcggggcgctccctgcagcccggcctgggcgggccctgggaacgggcggggaacggcctcgccccccggccccgcgcccctcggaccggagaagaggggctggcccagcgccagcgtcggagcgccggccccctccccgggccgctcgcagccaaccaggccctccagcggggcccacgtgacctggagtcctagacaaagaaaatgttccctccctcccccccgccgcccccctcccctcccagtggccccctccgcccccagccccatcgcccccttcccctcccccaagacgggcagctacttccagagcttcagggccgcggctcacacctgagcgcgactgcagaggggctgcacctggccttatgggtaggttcctggacggagccccggggagaccgggggcggggaggcggcagggccggtgggaggatctccgcagccctccgggtttgaaaagagtgaagtatgcctccccggcccgcagcagccgcggcgtcccggcctggcccgagttctggagatgctgacttagtgctggcccgccgccttcctgcccacgagccccaaggccccactcctcgagggctccagtggcacctggcgccctcgggggacaggaagagcagccggccgggagcccgggcagtggtaactgcaggctggggcacgcggagctggtggcccaggagttgggttggaggcagcttcagctgagctggcagatgggtgcctggcacttccctggtgacctgcgtttctggctgggggaccacgcggtcctcagggccctgccagcttgcggcctcttaagagggacagcttcctctcctgcgagttcctggaagcctccaggcaggccgccagaaagaagtggtggggggcgggagagcacggtgcgaccctgacagggggccggcctgtgacaccagggtagcccaaggccgcatgggcttgggggcggtggcgctcagacctctgacctttggaatgggaagcgctgcagtcgcagggggaggtggaggcgggacaactgcctgaggagatgggactggaccggaggcagtagtcaccggagttcccggtggctttcccagtctggacggactccaggcccaggggcttccgtgagccagcagggagtggggaatagtgtggtgtctcttgaatgccgcctggtttctccgcccccctgggggtgagcagcccgcagcccaaatgcgagagcctcgagttcacccctgtttctcttattgtttgcctggggaggaaggcaggagtgcagagggaaaggggtgctttccctacgccccagacaggcctagtctagtgaggcccctcccccacccagctccggctgccccttcccctttcgtcaggccccctgctgctcacccacccccccccccgcttcttccttcccccaccccactgccccagtcctgatggaggccccttcctcctccgccagcccttaccgggccgggtgcgtgttctgcaccaagtgggctggggatgctgaacagctcgcagcgcggcatctgacaagctgggggaagttgtgggggaagaagaatgttcaggaactcgctgtgaaggggctgagagacaaaggggccgtgggggagtgctgagggtggtgtcaggcacgactcctagacctggggagccagaggaggagcccagcccacctgctgctgccgctgccaggaactgatagcgggtcctttccccttcccgcccactgctacctgcacacctcgtactggctcaggggcctcgccacgcctggaaacggggtctttggatcatccgaggcatcaccctaggtcagccacccatgcctgaagcttgagaaggcgtggtgggcgaggagcagcggcgtggtgtgggctcctctgcgagggtagctgacgcagctgaggatcccagcaagggaggcaccctcccccatagcggggtccacacttcagtgcaccttctcgtaggggaggaggcgatggctaattgatagtaggaaggggagggcagagttctggccaggtgagagtggggctagggagcgatgagcaattactccacattcttccacccccgcagtccgatccgtgagctcattccgccatccatgagctcattttcccagctgtttgggggttgggggcaaaggatgcattatcctgttttagaatttgttgagtcagaggaagaactaggacttaacatcttcagtgtttttcggaatcgccataagaaacagattggtctgtggcttggaggcaaagacttgaagactcagtgaaattaaatgaatctgtaagacaatacattggaccactgagcttcaaacaaaggttcttaacctgggacccttggatctggggggtccattgacaggctttgggagagtcctgggaatcattggtccatatatacaccagatttttaaacaggtcagaaaagctttccagaaatccttccgttcaggtgcctttttatgttggagcaactcctagaaaggactgctccaaagtcagctgctggttgtgaggctccgacaggaatgtagaggctgcaacttcagattagagctcttcttcatactccaggttgcttgctcatcctctttacccttgaggatgggtttacattcgcagctctaggcccatgggggagctcttttgaaaggcatgtagaaaatggggttttctcccctctaaatctggtatggtggaaatgggtgcaaagccttgaagtcagagggccgtgtttcctagattcagtaaaaggctaatggttctcagagctaagtatcaaggatttcattctcctttgtagggatcctggagcgggttgtgagaaggaatgggcgcgtggatcgtagcctgaaagacgagtgtgatacggtgaaaggatggaggctgtgcaatgggagaataactggggtttggcttattaatttgttggtgggatggcagagagcacgcctggtctatagtgcctgctcagtaaataactgaatgaatacatgtatttatggatctgaagggtgcacatagaaggggtcgaatctggtaacaatacacactgggtgtgatccataagaactccagcatggcgtctgagcatgggaacagacaggctcttggggagcttcctatggtgtttgagcatgtgctggggggagatgggctctttaaacccagagcagtgatttcttcgtcagcagacatcacaaaactagaattgtggcctggaaaccaggaataggaaggattgattgcccaggggaattgtggagaagaagagagggtcccccttgctttttaaatttttggtgacagggtcttgctatgttgcccaggctggtcttgaactcctgggctcaagcgatcctccctgctcagtaactgggattacaggcacatgcctggctgaagatcctagtcttgattaagaagataggagagggtggaaccaatatctgtgtctaaacaatagtgcctgattaatatttggatagaattaacatctccataggtagggggagggatagcattaggagatatacggtataatgctaaatgacaagttaatgggtgcagcacaccaacatggcacatgaatacatatgtaacaaacctgcacgttgtgcacatgtaccctaaaacttaaagtataataataataaaattaaaaaaaaaacattaacgtaggctagacacagtggctcatgcctgtaatcccagcactttgggaggctgaggcgggcaaatcacctgaggtcaggagttagagaccagcctggtcaatatggcgaaaccccatctctactaaaaatacaaaaattagccaggtgtggtggtacatgcctgtaatcccagctactcgggaggctgagacaggcgaatcgcttgaacctgggaggtggaggttgcagtgagccgagattgcgccactgcactccagcctgggtgaaagagtgactctgtctccaaaaaaaaaaataaataaataacatttccgtatcatagggtaggcaaccgatatgctgatgagattgaggaagattagatctgggaggaaggtttcctaaaaggcagaaaagaaggctggaattgtgtgacttgagttcacctctctacttcaagtctttccatttttcacggcaaggcagctggttggctctctccagcccttgaccttctgtcactgttccgggttttgacaaacatggtccccttgagtgtcaggtggccttgctaattcctggagaggtcaaggtgactttttgttttttgtttccccaggctgagaagaaagccaaggtcattgcaggaatgaatgctgtggaagaaaaccaggggcccggggagtctcagaaggtggaggaggccagccctcctgctgtgcagcagcccactgaccccgcatcccccactgtggctaccacgcctgagcccgtggggtccgatgctggggacaagaatgccaccaaagcaggcgatgacgagccagagtacgaggtgagcggcttcttcaccagccgtggccagctctttccgggggccttccactgccagctcctcccgtcctgctctcctctctccatctcccacgggccgctcgctctctccacctgaccccgggcctcttcgtctccccgattttgctctgtcttgcctcattcagatggagctccctcctggctgtcctgccccccagatgcccagggctggggttgccatggggggatcagggtggcagggcctcgtgaccactgtgtaatgatttctgctccttggggctccaggacggccggggctttggcattggggagctggtgtgggggaaactgcggggcttctcctggtggccaggccgcattgtgtcttggtggatgacgggccggagccgagcagctgaaggcacccgctgggtcatgtggttcggagacggcaaattctcagtggtaagttgtggggtttggcagtagcctggggtgggggaaggttcttgatcccagggcctgtggttttggctgggggcagtctggaattggggtgatggaagtgggttctgctcacccctactctgcctgtggtgggtggaagaagctgtagggataattaggttgcacctgtggctcagagagctaggatgctggcccagttttagccttccaggaacctattcactagaattcctttccacctgcactcaggtacttccctactcttggtctggactcctctttgcatcgggtaattatttatcactgtatctggtcccctccagggctgagactgactctcgaggctcccagcccctgccagttgcaaggcatggggtgggtgcttgcaagtgtaagcctcggcaaacaaggcctggcttgtccccccaggtgtgtgttgagaagctgatgccgctgagctcgttttgcagtgcgttccaccaggccacgtacaacaagcagcccatgtaccgcaaagccatctacgaggtcctgcaggtgagtatccctgctgggagctcggaggaggagcctagagcactaggaggcctggaagttggagtgcaggtcgggcttgagcagaacggaggcccaggaggcagcgactcctttctctccacctcgctcgcccgtatgcacatcccgctcctcctcagcggttcctccccatcttgcctgtgccaccctcactactcagagtctggccttgagcctgacccatctgccttccagcctgtcctgacaaccccaaccctggcgtgtcaccctccaggtggccagcagccgcgcggggaagctgttcccggtgtgccacgacagcgatgagagtgacactgccaaggccgtggaggtgcagaacaagcccatgattgaatgggccctggggggcttccagccttctggccctaagggcctggagccaccagaaggtaaatgagggcacccagctttctgggacccctgcccgccaggcagatccacaccagggctgggaaagccatgcttagggagggctgccaaggcctccacagaggggcccagtgggaacagccggggtctctcttgccctggggtcaggacttgaatgacctgctctctgttggttggctagaaccgtagagttgggaggtgggaacaagttggagaccaggccgcaccccactgtaaggagggtgggggaaggggctggagtttcctgtcagcctgtaactgaccttggcacctgctttcctcctccagaagagaagaatccctacaaagaagtgtacacggacatgtgggtggaacctgaggcagctgcctacgcaccacctccaccagccaaaaagccccggaagagcacagcggagaagcccaaggtcaaggagattattgatgagcgcacaagaggtagttggcctgcttctggagagggtggcaccaggaggcctgcatccgaggagcaggcgcggcctcctctgacgccagctctcctccccttgcagagcggctggtgtacgaggtgcggcagaagtgccggaacattgagggtaagtttgttgcctgggaactctggcactcctagtgtggcatggggcagagtagcagaggcacttaggaaggtttgaatgacatgggaccaggggccacgtcctgcgtgtcacaccaccttcaccgtgcttcgtgcactgtctgtctttctggtgccatgattctgctctcctgtcaatggcgtgggctggtcttcagggtgtgggactccccagtggccacagaagggcagcccctcttgggtgtgactgaactcacctacaggtcccctttcagcctttcacctttgctcacctctctcatcctggggctgtcgccctcagcctggtgctggtggatctggctcaggaccctcggcctgggaggattggggcaggggtcaggacttgaggattaccccgggaatccctcctgagtaacctggaaccagggctgcttctcatgagcaggtttctgtcctgctgtcactccatccctgtttgtggatggtggcattggtgctctgagatgatggcgttcgagactggggtcacagtgcctcccttttccgtggggcaccctggactcttttctggctgccgctctggcacaccccttttttgtggctggtctggtgctgggctccggcccggggagggagaggcccttcggtggtactcaccccatcccctccctctgctttccagacatctgcatctcctgtgggagcctcaatgttaccctggaacaccccctcttcgttggaggaatgtgccaaaactgcaaggtaggagcacacccacccaggagaggtgccgttgaggccggcccttcggccttctggctgactgtgtccaccgcttctgggcatgtacagggtgacacccggtgtgcgtgtgatgtagacttcagagcttcctctggaagcagagtcctgatgacacgggcccttgggtttcaagcttttgacttgctctcatttttctcctctgaaagattctttacctctctcaagccccattttagtccccagatgtggggatgggagcagagcagcggggacaagctcaggcagagtgtagcagggttgccgtgccctggggagcccaggagaaaaacccagggctgcaggaaggcccaaggtggtggtgcagccccctccctggccttgttctcaggctgctctttggttctgtccatggcggtgcacaggcagatgaggtttccccttcccagatctgcagctggggcctgaccctggctaaggtggtggcggggtcatgtcttcagggcttaggctctgtgaggccaggtgtggagcctcccttcgtcctggccgtcctgggacccgtcctggtggtttctgacccttcccgctgctgtctagaactgctttctggagtgtgcgtaccagtacgacgacgacggctaccagtcctactgcaccatctgctgtgggggccgtgaggtgctcatgtgcggaaacaacaactgctgcaggtgaggctgttgtggcctccagtggtctccttagctgggccccaggctcccgccgcccaccgcctcccctcctctcccttccccacagaccctccaccccctagccatgctccagacccggtctttccattccaggtagcacaccttggcctccccggaccagggctgagagtctcctctgctcactgggtctccttccaggtgcttttgcgtggagtgtgtggacctcttggtggggccgggggctgcccaggcagccattaaggaagacccctggaactgctacatgtgcgggcacaagggtacctacgggctgctgcggcggcgagaggactggccctcccggctccagatgttcttcgctaataaccacgaccaggaatttgtgagtgctgggcctggggcgcggtctcgagctcccttggctgagccttggttgtggggcctgagctgtgcgcagggtgtgtgggtctaggagcctggctggagggccagcgctgggtgggagcttgggacaccgatgggcctgcatctgacctgttgtgctcactgcttaggaccctccaaaggtttacccacctgtcccagctgagaagaggaagcccatccgggtgctgtctctctttgatggaatcgctacaggtgaggggtgcaggcccaagaggtgctggccgccttgtcccaggatgggggagccaggtgtgtgggcaactctggcaaaacgaaatgatggttagcttcacagctgttaaaatattatcccaaaggggaagcttgtgtgtgaagtggaaacgtatgcagtccgtggacttagatttgaccaaaaataaaaaagtaaaacaggtggtaaagcagcctgcctgctgggcgcttccttagtaaggaagattcagccacagaggccgagtgatcattagtcagattcacagagatttcacagagcctcaaaggacagattcagcaagacagaaacatacacagttctgttgtgttttgattatacacaagatagtctaaagaagacttatttaaatcacccattatccttttattaatattttggcatatgtccttttcagatttttttctgtgcgtttgtgtttatataaccatacatccatagatagataaattaagtgggtagtgaatgcacacggttttgtaacttgccttgcatttattatattatgattgctttttcatgtcaagcgatataaagctacatttttttttttttttttgagacggagtctgttgcccaggctggagtgcagtggtgccatcttggcccactgcaacctctgcctcctgggttcaagcagttctcctgcctcagcctcccgagtagctgggactgcaggcacccaccaccacgcccagctaatttttgtgtttttagtagagacggtgtttcaccgtgttggccaggctggtctcgatctcttgaccttgtgatccgcccacctcggcctcccaaagtgctgggattacaggcatgagccaccagacccggccaaagctacattctttatttgtaagtgttgcgtaaggttccattgagtcaaagtgccgtaatttatttaacgaacccctattaggtcatttactatttttttaattattattataagtagtgctgtgacaagcatcctgatagaatatatacttgaaccattccctccttaggagaacctttaggagatgctgggtcaccctgcaggcattgtttgcttcatgtgactctggacactgcagaaagcgtcctaggagattgtgaagacacatccacccctctgccctgcccccccagccaagggcttcccggcttttaagaaaggaatagctcttcttagaattcatgtctttggccagagggagataggcagtctcaacccagggaccctggttagagggtgaggcggaggggatggcttccccggccagatgtttgtcttctgttctcagctccatgctgctcttctgtaaacctagagaagttcatttacagctttttgtatcccagactggaaccttgaggccttcttaaatcatgtcacaccccaggaggctgtaaaagctccttggctgggggacatgttgggagcagcagaaacagtgccgtaccctgtttctcccgagaccctctcgggatctgctctgattgtttccttgcctcagttcggctagcatttctggagggggagggatcgtggtaaggaaatctgtgtggttagctcgggggaagcacaatgaaggaggcctcctctgtctggaagagcctttgcaatccacgagagggctgagtgaggaatggaaactgctctgatggggaggcaagggatgcacagagctggggactcatagcggagggggcggtgattccaggggctactgggtggggcagggcatttatgaaacctttgtggagcagggaacattcaggttgagtcaaagggtggggtagaattgtagcaggaggtgataagagggtatggaaggaccaagttgtagacggacaacaacaaagaaaaggcccccaaaaagtcagctgtgattcttcctggatcctggaaccatgtactctccggtcagttttctgcagctttgactgccttccagataggccaaacgaggcatgagacagagcctcgatgtccttactatggatactccagttggatccagaaaggatttaaggcatcttcagggaaaagataggacttgggcctacagctgaccccatgggtcctgttggccagcaggctcacctgccgagaccagggtgccagggagatggctccaagtaacggtgctgtctgctggctggtgcagggctcctggtgctgaaggacttgggcattcaggtggaccgctacattgcctcggaggtgtgtgaggactccatcacggtgggcatggtgcggcaccaggggaagatcatgtacgtcggggacgtccgcagcgtcacacagaagcatgtatgtccatgctgtggggcgcagcccgtcttcccctccctgcacactcagcacctggaggcagcccttgcctcctttcattttgttcatttgccctctttctcttcaccctttgccccagcctctttttctccttatcttccatttgtcctctgtcttgagagggtaaagggcaaattgaaatgggaatttgggctaggcatggtggctcatgcctataatgccagcactttgggaggccaaggtaggagaatcccttgaggccaggggtttaagactagcttgggcaacatagtgcctacttgagctctggctactccctgggctggtttctggacagtttctagtagagctctttggattagagagaggttcctgtcctcccaatacttttggcaaatagctttatcagcttccatatctgggaggctcaggcagggtcttcccttaagcatgactacaggccctctggagtcctgaagggcaactggaggacattcacatggcccagacaccctgcctaagacactcagcatgccaggtaccttcagactcagccatccacttgggtcaccttcccagtgggtggctgtgttgcctgcctgggtgatactagtttccccattggcctaagaaatgatccaacttggtcccgttcttgtttaggacttgtccatggttgcagctagggtcgtgagcctgcagagcagctgggtctcctctctttcgtgtcaaaggacttctttgccaagttcacagataatttctctttcttcctgtctgcctctgtccctggacagcaggcccatcacgttgcctttatcctcccagatccaggagtggggcccattcgatctggtgattgggggcagtccctgcaatgacctctccatcgtcaaccctgctcgcaagggcctctacggtaggtaccatcctgtcccctccaccttctcagctggtgcttccgcacataggcttcctccttggatatttctgccctgggacagctattcccgatgaccctgtcttcccgtgccctccccgtgcccgagccacaccactgtcctatgcagacagccccagctgatggctttctcttccgacctctcagagggcactggccggctcttctttgagttctaccgcctcctgcatgatgcgcggcccaaggagggagatgatcgccccttcttctggctctttgagaatgtggtggccatgggcgttagtgacaagagggacatctcgcgatttctcgaggtatagccagcaaccttggtttggccagctcactaatggcttctaccttggactgctgcttcatcctgtctcatctgcattgtggagctggggactggtgacttctgctttgcaaggggcctgtttgggaagccccaggcttcctggatagaaagggaggaagcagggttagaggcctacctcggaaagaaccagtggtctcactctaagaggtggcattgtgggtgtggacctccggggttgaaggacctgtcactcaatcaggtggggtgccagactcctggggttgggtattctgtatggtgtttgttacacaccaggatctttgagaggacaaaatcagttttccctgagcaagaagggcctatcctcactccctggtaccatgacaggcacctgagaagaaaacaagacttagctcagttttcattccttatcatgtgagtccccgtttaaccctgagccaagtctgagccgcgtgcagagggcttctgctgccagaggcgtgcttggagtggcccttctgggagcttgagcccacctgtgctcctgagtcttggggtgggtcacactgtgagctggtgttctgactgtaagtgtgagcaggcgtctgtttgagttctaatcagggctcatggtaaacacacccatactcgctggagcctgggctctcccagcctctgggtagtctagagcagcactgtgcaatatggtagccaccagccacatgcggctgtttacattaacattaaccattcagctcctcaatcacattggcctcattttaggtacaaaatagccacctgtactagtgggctagtggccactgaattgaacagtgtagaggacaacccaccatcgcagaagttcatttggacaatgctgatctagaacgttccagtgacagcttgtggaatgtggctaggtgtaattccagcttctcctggaggctgcaggctagcccagtgtgtggctcctgagagagaagtaagaggctttgaggctttaaggctcgaccccagcagcatgccggcgctgtttcatgctcctccttggctcatcttcaaaccgtctcctgttttgtagtccaaccctgtgatgattgatgccaaagaagtgtcagctgcacacagggcccgctacttctggggtaaccttcccggtatgaacaggttggtgaaagctcctgggcctggggggctgtgggctgggactgcaggtgggatgacccatagtggggaagcccctgagccgggccctctctggccggcctctgctgaatgactagctgctctgccatgttccttatttccttttccttgaggaggaagaggagtcagggtatagaaaatactcgtctgaaaccaacaactagtggtcttaaagcaggacctttaaaagtactctctttataccaaagaagagtcctgtgctgctgagttaggtagttggttttctgacattggtgatgtgtcccgagccctctggttcttagattctcctgaggcaaagccatggggcatggctttggggctgggaaggggagttgtggccacagcctgttccaggagagggaatcttgcagcggctgcatgcaagttcagggttctgcttaacttaattttactaatcacacactttgttggcttcaggtccttttttggagagattttcttcagttaggttacacagataaagattttaatatctaggaatgaagaaaattcatttcatcagttataaaactggcattataaaaaggctttttaggcgaaataaattgtccagagttggcaattcaaaagcatgctgagagccgctcagtccctgtccattgtggagggaagcgttttccagagtgttctgagtcatgggtgttaaacctccatggtgggctgcttggtatacttggtataactaggagacatcatttcacctggcctcggtcaaataatctccctccttgctattcccatgaggttgtaggaccttccccatctcatacatgtttggtagagttgctatcgagggcttgttgaggggaaggagatggggcattggggcagctggcctgaaactgtcccccgagagttcccaagatacatgtgcatattgggaaatggatgggctaatgaggtccagtattttcatggaaccactcagtgtctcccgacagaccttggtcctgtgggatttctcgcctgcttctttcaactctaaaatactaaactctgagcttctaggaggagcagaggtcctgcatgcagggccgactgggcagtgcacgcataaagagtcggggacatctgtcgagcacctgatttgactgcaggccccgtggttcccacactgagatcctggagccagtgctcagggaagccttccttaaatatccttacatgtcagaaaaggtcagcgttgaaggggacagccagtcagttatgtggcctgcaccctgagaagtgacatatttaatgtcacagaatttttggtctttagggaactgcagaatttaagtctggttttttttttttttggagacagagtcttgctctgtcgcccaggctggagtgcagtggtgccatcctggctcactgcagcctccgcctcccaggttcaagcgattctcctgcctcagcctcccgagtagctgggattacaggcacctgccaccacgtctggctaatttttatattagtagagaccgggtttcaccatgttgatcaggatggactcaaactcctgacctcaggtgacccgcctgcctcagccttccaaagggctgggattgcaggcatgagccactgcgcctggcccagaatttagtcttttaaagcagtacatttaaggcttgcggtttgattaatttcatccagtggacacacccgtgtaacaatcaccacaaatcaagatacagaacattgtcacccccaaagcttgcttcgcagtgggacgcttaaagctcagtgtattttagactaactgatgtaaagatagctgtgctttttttttctttttctgctaggtgttatctgcctgttcacaatttgagaccacttttgaatttacctttaaggattaacgcttggtggatttgtgtctttgcatggctgcagtgtgtgttcgtgtgtttgcggggagtttgaagagagttatgacgtgtgtgcgtgatttggggaaggggctcttaccctgtgaactagtggctgctgggggagggaggggagtcgtgcagctggggcccttcccgctgttatccaggtttctgttgttacagtctctcttctgcctcctaggccgttggcatccactgtgaatgataagctggagctgcaggagtgtctggagcatggcaggatagccaaggtcagctccagcgtctagaacctctgctggggggcagggagaaggaagggcaggatgaggtggagcggtggccagggccttgtcccgcctgcttctccagctagtgtggagaatgcaatttaggagacggtgcagggtcatgcagcagggcagccagaggagggcccagggctgctggccttcagcccttcctccctggtgagtgtcgcccatcacccccggtagacactgaggagtctttaccaagacctggttgtgctgtggcttttttttcatttttaaattttttggccaaaacctattacaaaagccctcaaagcagcctcctgtgatgtggaagctccatttctctctggagctggaatctcccggagtgactacctggggcactgggttctgtgtcagcaggttccagcattcagaaccactggcagctccgagggcatctttgagcccctcagtaacttggcatcctttagcctacaagttactccatctctgaaagaactaattctttggaagacttggaaagtacagtggctacagcttctacttctaaagtctgtggctaggccgggtgcggtggctcacgcctataatcccaatactttgggaggccgaggcaggcggatcacctgaggtcaggagtttgagaccagcctggccgacacggtgaaaccctgtctgactaaaaatataaaaattagccaggcatggtggcgggcgcctgtagtcccagctactcaggagtctgaggcattagaatcgcttgaacccgggaggtggaggttacagtgagctgagatcgcaccactgcagtccagcctgggtgacagagcgagactccgtctcaaaaaaaaaaaaaaaagtctgtggctagatggatctaagattggccaggtgacctccaagtaggaagaaaagtgaggctgtggggtctgtggaggctcctgccctgcgaactctgctcactcagagccatacccagccccctgggtggaccaggccctgtcagggtttggcgagtacctggcatatttggtagacgcatgaccagtgttggctggtgaatgaattcgtgcttattcctcttttctcctcttcatctagttcagcaaagtgaggaccattactacgaggtcaaactccataaagcagggcaaagaccagcattttcctgtcttcatgaatgagaaagaggacatcttatggtgcactgaaatggaaaggtacccgggttgtgctggcatctggctgcagtgtggctgttctgattgctgtgcttgctgcgggggtcctctgcctttcccacctgacttgttttccacaaacgtcctgggaacagtgggttttatcaagcatttcccaacatggcagactcctggggtggactcctgacaccccaggctcctgggtattttaaggttggtcccaagtaagaggagtctaggggccaggagcagtggctcatgcctataatcccagcactttgggaggccgaggcgggtggatcacctgaggtcaggagttcgagaccagcctggccaacatggcgaaaccccgtctctactaaaaatacaaaaattagctgggtgtggtggcgggtgcctgtagtcccagctactcaggaggctgagacaggagaatcgcttgaacctgggaggtggaggttgcagtgagccgagattgcgccactgtgctccagcctgtgcaacagagagattccatctcaaagggaaaaaaaaaaaaaagaggagtctaggaaatcccctgctgccttgtctcccagagaccctgctgatcccccagggaaccactgcagtgacaggaccttaacttgtggtgccaattttataggtcttttgtaaaccaagccagcatagggccaggcagacctcgcagcctcaacaccctgatttgatgcaaatgggactttcggggctggatgaccttcttgttctctgagtgtaactaggatttagccagacaaagagaccatttacacaaacaaccagagcaaacaggaaatccttcagcttctgaagtcaggcaggagttcggctcctttttcgccttccctgctcttgatggggaggatgctagggctacgtgttcgttacatgcagactccaggtgtacgttgccgagctaaccctgcaggagaggagaactagagagtgtgtcctggaggtatttctgagggattgttcaaaattactcttatttctgctgggttgtgaaactctaggcagtgatgaccttactacctttaaggtcacagaaaccagcacagtgcctggcacatggttggtgatctgagtgccgggttgtttataaaggacagaagattcggcagaactaagcaggcgtcagaggagttggtgggtgtgagtgcccctgtccctgcacttcgggtggctgctggtcctccgggtcctgctgtgtggttagacggcttccgggcagcctggtctggccagcactcaccctgccctctctgccttttctcccccagggtatttggtttcccagtccactatactgacgtctccaacatgagccgcttggcgaggcagagactgctgggccggtcatggagcgtgccagtcatccgccacctcttcgctccgctgaaggagtattttgcgtgtgtgtaagggacatgggggcaaactgaggtagcgacacaaagttaaacaaacaaacaaaaaacacaaaacataataaaacaccaagaacatgaggatggagagaagtatcagcacccagaagagaaaaaggaatttaaaacaaaaaccacagaggcggaaataccggagggctttgccttgcgaaaagggttggacatcatctcctgatttttcaatgttattcttcagtcctatttaaaaacaaaaccaagctcccttcccttcctcccccttcccttttttttcggtcagaccttttattttctactcttttcagaggggttttctgtttgtttgggttttgtttcttgctgtgactgaaacaagaaggttattgcagcaaaaatcagtaacaaaaaatagtaacaataccttgcagaggaaaggtgggagagaggaaaaaaggaaattctatagaaatctatatattgggttgtttttttttttgttttttgttttttttttttgggtttttttttttactatatatcttttttttgttgtctctagcctgatcagataggagcacaagcaggggacggaaagagagagacactcaggcggcagcattccctcccagccactgagctgtcgtgccagcaccattcctggtcacgcaaaacagaacccagttagcagcagggagacgagaacaccacacaagacatttttctacagtatttcaggtgcctaccacacaggaaaccttgaagaaaatcagtttctagaagccgctgttacctcttgtttacagtttatatatatatgatagatatgagatatatatataaaaggtactgttaactactgtacaacccgacttcataatggtgctttcaaacagcgagatgagtaaaaacatcagcttccacgttgccttctgcgcaaagggtttcaccaaggatggagaaagggagacagcttgcagatggcgcgttctcacggtgggctcttccccttggtttgtaacgaagtgaaggaggagaacttgggagccaggttctccctgccaaaaagggggctagatgaggtggtcgggcccgtggacagctgagagtgggattcatccagactcatgcaataaccctttgattgttttctaaaaggagactccctcggcaagatggcagagggtacggagtcttcaggcccagtttctcactttagccaattcgagggctccttgtggtgggatcagaactaatccagagtgtgggaaagtgacagtcaaaaccccacctggagcaaataaaaaaacatacaaaacgtactggtgctttcctgtctaagtcgccttttgtgtgttcttttatgaggcccccaccatccacccctctgtgcacaaggcggctcccggcccctggaatgtgatgtttttggtcatctccaaaggctgcagttttatactgggaggctgatgacaccttttattataattattcttatggttctggttataattatgtttgttttaagattttctttaagaaaacaaaaacccaacacccttccctttaggtttcaaaccaaggtgcgggagcagggtgcttctgagttagcggtggctctggtgccctggctcccacccctcgggccaggtgggccactgggcatggtgacagctgggcggccagggagtccccaaggtctgccttctgggcttgtcactcttctcttctacttcccctcctcttgagtcgggtgtgtcagggctggagggaggaccggccgtctctctccttgtgtgtgtgattggagtggtgtgtatttcttttctagtacttggtctgatgatagctgtgctcttacctcgagtcagcagcacctggagccccaagtgctcaacactttgttctacttcctacaaggcaggcggcctggcgtcagtagtaggaagggatggcattgttggctccagggtgagggcccgacgggcaggtgcttgcctgggtagatggggtgtagatatgtggcatatagagatatatattttataatgggaggggggatggcacctcctgggactggtagagctgggaggtgtgtcggcaagcacatggccccaagtccacgtccctagaaagatggggcctacagtgataggcgctctataaatacatagatagggtcatgtttaagaaatattatggggtggggagtgggggaagcaggcttagtgtgctgagcctcggtccccactgcagacctaaaccccacaccaatcagtcaatctcacacgcatacacaggagcatatttctgtactgatgcataatgaatgcactcacacacacacacacacgccagggggctcccagcactcttctcccagggttcaggactttgtggagtcagcccgtgcagctatttacctctgttgccctgattgcaggtagactgtcaatcccagaagttgctaggtgctgaggcaggaaaaggaggaggtttcttttagcaggtgctctcctctagcaggtagtgttctatctcttttgcccctggtgatgtcaaaagattcttctgttagcaacctgtgatactgacctgcaactctaggcaccagtcaagtcagccctcaactccccctacctattctccccaactgaaatcaaattgacatccaggtctgtcttggccagggggcttccattggggaaaaaaaatgggacagtgaacctcacctattgaataaaccaaattagtaattagtgacaaaaccaaaccaaggctttggaccccctgctcattactcaggagtaaattcacacagctggtggccggtctcacccctttttggggtgcttggtcctggaccccaatctactgtctcctcgacagattggtgtttaagatcatgcccagttgcttcctgtcacctcttgacaggtggtgactgggctgctgtggggctggagcagcgaggaagggagcctctgccccctcagtggagtccctgtgctaactgtggtgctcacccagctcctccttgctcccgcggggctctgtccttcgggcctggagtccaccagcgccactccaggagggctgggggaggaggggctgcctcaggcagtccaaggtgctccctcccccgctggccaatgctaaggtcttcccggctcccagggtcaggacagagtcttctaaggctcaggctctcccaagccactgcttagtgacagttagcctttcccagcggcccaagctccaccggaactgggcctggtgctccaaccaaagggttggtgttgggacttgggaagagacttggtagccaagggcatggcaagcctgggggattcctgtgggccggcttgctcgaggagggagtgctgggcacagaggagcccttatggctgacagcttgagagcacttgttcctccagatctagccacttgaccaggccctagaatggaccagatgccccaggggtcatggccccccccccccccccttgcagggacgagagttaacaatcaccagcttttcttccggcccagcctgtgtgcttggtctcacagtagaatttaggagagtgtggggctttgggattgtgccaacttggccaagctgagatatgcttaatccacctcaacgctggggcctctggggacaggtattgggtcaccttccaaggggtgctgaacttcagcaggctgtagataaggcagaggttagaggcagtggagtgggggaaccaagaaggcctagggaaaattgccaggcatattccctgtggaattttctttccgaagagtaggcccatttcccccttagaaacaagggttctgggggctgatgacagcttcccctgcaggtgccaggtggcgcatgatgccaaagagatccgtggctcttgcctgggggaggtagccaggtgctcgtgctggggacacagtccttggcctcctgcctaagcaggaagctagtttccagcaggcggctggtactaaccccccgccccacgggagcgacaggctggtgcaccggcagactggggggccgcaggcgggcactagcaggggtctgcagtccatagatgatgacatgaatctgttgctgtccttttgtctctaggccccagagacttcttgctattgaacatcctattggaaagcaaactttccaagagagcacccgggacctgttagcttttgaaacaggcctgggtgtgattgactggtagagatgcctgtgtgatttttggcgcattgcaggagtgtggattgggacaggcaccccagcaggaaggaaggctgacaccaaaggggtctcacagggcccagctccccttgcttcccgataattggccaccaggccatggcgactctggggaagcctagatgggaacacccaccttctccagcagtagaaggaatatttcagcagagccatctgggagatgttcttataggaaaactgcagtcattcatttcatagttttgcttatataaatagagtacatttgggaggcagttttgaattcctgttgctactctgcttggtgcggagttgcagtggccccaagtgtctttcagagctgttgcttttaggatccccctcaagctgtgggttagggccagggcagggagggggtgctgcctggcactgtgccctgaagagggctgcttgcttcctttggtcgggagcacggcagagccaacattctggtgggaaccgagtttctagccaggcccctgttttggtcccgggaggtgagtaatctgagtttgtcattgcgtattctccacgctgcctgctctcagtgctggagactagagagcgaccctggagttgtcctctgggagtcctgcctgtttgccagggagcagctgaaacctccccgctcccaatcccgggggtggaaaaggtgtagtggaggaatggtctggagctgggatggcccttctggccatgccctgctgagccaggattaaggaaagtgtcagccgcctccttaccaggccctgtgctggggtcaggaggaccgggaggagagggaaggggtgagaggatggactctgctgttgtagtgtgagctctggaatctttacgttttggtaaaggcaggccagggtctttgaggatcgagttggggaaccttgcctctgtgtttccgagacccagctaaggtgggcctttggtgggtgacctgtctctgacccgaggcagcagagttttgggggagggagaaacaagcaaggagcagggaggacaaggacacaagatccctttgctggtggtgacttactcacttcccccaccagagggcctgggactcccgaaactcccgtaactggaaagctccctggctcagctccactggggggtgaggagggcggctccctcagccccagcctagcggcctccaaccctgtgcctgagaacatgagcagcggtctaaagcatcccctagtcccatttcacttcacagaccgatttggttgcacagccctagaattcaacagacaacaaaaatgctgaaattccttagaatacgcagagggaggaggtgactcaccaaggtgctaaaacattttattaaaaatatatattgttaaattaagtctgctgtctggacaatgactgtttgttttgttttcttgtagtggagtttaaaagagactattattttactctgatatattattattaaaaaggcattttaactttgtacttgaaaactaaatgagcgatttcatgtgttttagctgaggcattgaagtagcgggtgcttacttatttgtgggaaatcatgtattcatactgaagaataaactccgtagctgatttggtaataacttttactgttacagacgatttcgctttgaccccggtggcagagcacttttactccacattccacgcagctaaatgcaggacttcccagactcttccctccccagccctctttcctttctcttaagttcctcttttctcctttattattattatttttttttcctggttccagcatcctttcaccactgtatttttttttttttttttttttttttttttttttttttttttttttttttttgggggggctcccctttttttggccaaaaaaattgtcaattcccccttcgggttctcggaaattctggggacccccattggggcccctgggggnnnnnnnnnnnnnnnnnnnntgggggggaaaaaaattccccccgggaaacgcctttgccccggtttaggaatcggggcccgggccccaaaaaggggaattttattttttttaccgggggcattaaagaggggggggcttattttttttggggaaaacattttttctaccggaaaaaaaaaccccctggcggttttggaaaaaacttttttttttaaaaaggatttggttttaaccccggggggggggggtttttttccccaattccccccgggaaaaaggggggtttcccgaaattttccccccccggccctttttcttttttttaaaggcccccttttcccccttttaataatattttttttttccgggttccgccaccctttccccccggaattttttttttttttttttttttttttttttttttttttttttttttttttagggttgcttctctatttattgacaataataatgtacatttcacagtctggttctaggacattcagggaagggcgagtgggggcccgaggggtccctgccccacccgcctggtgtcctgttgtatctctgtgtaagtgatgctcgtgacatagctgtttatgaaataattaaagaggtcaatgcgtacaacagatgtagaaagtctgtcagttccgccttcatcacatttttttttgtgcccagaagaatataataaagctcctttctaatgtacttgtgctggagaacacttgaataaatggactgtttttgtgcaaaaagaaaaatggaaaagcaccgtaataatgtcgttttgtcttgcgtctcctttccctgccatgactgttcacagcctcctccagggggctcaagtacctaagcggggaggtgctagcgtcgggcccagatgatgtagggcctccctaaaaaacgtcacctgtgtgagcatcaaattagtaaatgggagctgtcccctgggtgcaggaaagagtttggttgactggaagctgaaaaataagttatggtgagacagggttgctgggaaagcaaattcagctctgggctgagcaacagaagttttcataccagagcagggagaagagcgcgccttatgccaatgccttggtcagacacggcgcgaggaggatttttgaacctaggtactcaaactctaaacagggttttggcaacaagcgagcatccagagtggtagatggtcgggaatgtcaaggggccccagaacaaatcggggcatttgtcctagaaaaagcaggaattggtaggccaatgtttgtaaacacggacagggcgagcccaaagggccggggtctttccaggtgttccacaggcaggtggaatggtgtgggggaagccagtgtcagctcagcataaggggagggaggtccctttccctgctccagccaacaatgcaagggccaccttgagtgcagtgacagccactcagggatacccccagttttcccttcagaccccaagtctgagttcctctcactgtatggccctccccagagctgtcttgcaagtggacagtgcctcatggtctgcagagcccttcacccagtgttccctttgtctgcatgactcaataatcactagttctctgtccccacctatctaaagtgaccatctggctgggcgcagtggctcatgcctgtattcccagcactttgggaggctgaggtggatggatcacctgaggttgggggttcaagatcagcctggccaacatgctgaaaccgcatctctactaaaaatacaaagattagccgggtgtggtggtgcacgcttgtaatcccagctacttgggaagttgaggtaggagaattgcttgaacctgggaggtggaggttgcagcgagctctcattgtgccactgcactccagtgtgggctggatacagagcgagactgtatcaaataaataaataaataaatgtgaccatctgaataaatgcaagaactgggatgattcataccacatctcaactctaagacctcaagcatctgtgtttcagtttcatcttctaagtgcctagcaggtctagccagtgcttgcttctcttaaagaagggttacttggctgggcatggtggctcacgcctgtaatgccagcacactgggaggccgagggaggtggatcacttgaggtcaggagttcgagaccagcctggccaacatggtgaaaccctctctctactaaaaatacaaaaattgtccaggcatggtggtgggcacctgtaatcccagctactctggaggctgaggcaggagaattgcttgaaaccgggaggtggagattgcagtgagctaagattgtgccactgcactgcagcctgggtgacagagtgagactctgtctcaaaataaaaaataaaaaaaagaggaagggttactcaaggtttcttctcttacattaggtttcaggggtttaggactgtaccacttcactggaagtattgaaagaaattataaggggaacgtttgaggaaaaggggacaaccctactaaactaacaggttttttcctcatgggcacgtctttcttttttcacaaagttgtaactatacatttaacttgtactttttcttagtatttttcagtgttgatgtagaattatttttatttcaatagtttttggggtacaggtggtttggttacatggatgagttctttagtagtggaatttttttttttttttccgtgagacagagtctcgctctgtcgcccaggctggagtgcagtggcacaatctcagctcactgcaagctccacctcctgggtttacgccattctgcctcagcctcccgagtagctgggactacaggcgcccgccaccatgcccggctaatttttttttgtatttttagtagagacggggtttcaccgtgttagccaggatggtctcgatctcctgacctcatgatccacctgcctcggcctcccaaagtgctaggattacaggcgtgagccactgtgcctggctggaattttttttttaaatggcttcgtggcactttcttgttggatatttgtttctatttttttattttagctacaaatagagcttctgtaaacatctttatgttttggcttttttctgtccatattttgtattttttccttaaaatggattcccagaaataaaacttattggagcaaagtagctgcacattttggttggctcctcacacatttgcctggttcttcagctctcaggctgtcagttcagaaagaagcaaacctggttcttagttggaccaattcagaaatgtgttcatctcagtggggaagtcaagacccaagatttttttttctttttgagagtctagaaattagcaagaagcaagaggtataagcaatttcatctggccactgaattttgaaaattagcttatctggaggaatcctggtaggagatggaactcggactgaatcttcaagacttagctccaaagagagatgggagggctgggagaggtgggcattggtgccctttagctctggaagccatgcctgattgtcccagtgtcatcagagctgggagtgggaggtctggcaagaacttacgggacagagggagctactggagccatttggttaataaataccattctgtgacaggccgagtgcagtggctcacacctgtaatgccagcactttgggaggccgaggcaagcagattgcctgagctcaggagtttgagaccagcctgggcaacatggcaaaaccccgtctctactaaaattacaaaaaattagctgggcgtggtggtgtgtgcctgtaatcccagctatttgggaggctcaggcagagaatcacttgaacctgggagggggagtttgcagtgaaccaagatggcgccactgc

SEQ ID NO: 279 - DNA, 3009 bp, Homo sapiens
gccgcggcaccagggcgcgcagccgggccggcccgaccccaccggccatacggtggagccatcgaagcccccacccacaggctgacagaggcaccgttcaccagagggctcaacaccgggatctatgtttaagttttaactctcgcctccaaagaccacgataattccttccccaaagcccagcagccccccagccccgcgcagccccagcctgcctcccggcgcccagatgcccgccatgccctccagcggccccggggacaccagcagctctgctgcggagcgggaggaggaccgaaaggacggagaggagcaggaggagccgcgtggcaaggaggagcgccaagagcccagcaccacggcacggaaggtggggcggcctgggaggaagcgcaagcaccccccggtggaaagcggtgacacgccaaaggaccctgcggtgatctccaagtccccatccatggcccaggactcaggcgcctcagagctattacccaatggggacttggagaagcggagtgagccccagccagaggaggggagccctgctggggggcagaagggcggggccccagcagagggagagggtgcagctgagaccctgcctgaagcctcaagagcagtggaaaatggctgctgcacccccaaggagggccgaggagcccctgcagaagcgggcaaagaacagaaggagaccaacatcgaatccatgaaaatggaggcaaggctcccggggccggctgcggggtggcttgggctgggagtccagcctccgtcagcggcccatgccgaggctcaccttccaggcgggggacccctactacatcagcaagcgcaagcgggacgagtggctggcacgctggaaaagggaggctgagaagaaagccaaggtcattgcaggaatgaatgctgtggaagaaaaccaggggcccggggagtctcagaaggtggaggaggccagccctcctgctgtgcagcagcccactgaccccgcatcccccactgtggctaccacgcctgagcccgtggggtccgatgctggggacaagaatgccaccaaagcaggcgatgacgagccagagtacgaggacggccggggctttggcattggggagctggtgtgggggaaactgcggggcttctcctggtggccaggccgcattgtgtcttggtggatgacgggccggagccgagcagctgaaggcacccgctgggtcatgtggttcggagacggcaaattctcagtggtgtgtgttgagaagctgatgccgctgagctcgttttgcagtgcgttccaccaggccacgtacaacaagcagcccatgtaccgcaaagccatctacgaggtcctgcaggtggccagcagccgcgcggggaagctgttcccggtgtgccacgacagcgatgagagtgacactgccaaggccgtggaggtgcagaacaagcccatgattgaatgggccctggggggcttccagccttctggccctaagggcctggagccaccagaagaagagaagaatccctacaaagaagtgtacacggacatgtgggtggaacctgaggcagctgcctacgcaccacctccaccagccaaaaagccccggaagagcacagcggagaagcccaaggtcaaggagattattgatgagcgcacaagagagcggctggtgtacgaggtgcggcagaagtgccggaacattgaggacatctgcatctcctgtgggagcctcaatgttaccctggaacaccccctcttcgttggaggaatgtgccaaaactgcaagaactgctttctggagtgtgcgtaccagtacgacgacgacggctaccagtcctactgcaccatctgctgtgggggccgtgaggtgctcatgtgcggaaacaacaactgctgcaggtgcttttgcgtggagtgtgtggacctcttggtggggccgggggctgcccaggcagccattaaggaagacccctggaactgctacatgtgcgggcacaagggtacctacgggctgctgcggcggcgagaggactggccctcccggctccagatgttcttcgctaataaccacgaccaggaatttgaccctccaaaggtttacccacctgtcccagctgagaagaggaagcccatccgggtgctgtctctctttgatggaatcgctacagggctcctggtgctgaaggacttgggcattcaggtggaccgctacattgcctcggaggtgtgtgaggactccatcacggtgggcatggtgcggcaccaggggaagatcatgtacgtcggggacgtccgcagcgtcacacagaagcatatccaggagtggggcccattcgatctggtgattgggggcagtccctgcaatgacctctccatcgtcaaccctgctcgcaagggcctctacgagggcactggccggctcttctttgagttctaccgcctcctgcatgatgcgcggcccaaggagggagatgatcgccccttcttctggctctttgagaatgtggtggccatgggcgttagtgacaagagggacatctcgcgatttctcgagtccaaccctgtgatgattgatgccaaagaagtgtcagctgcacacagggcccgctacttctggggtaaccttcccggtatgaacaggccgttggcatccactgtgaatgataagctggagctgcaggagtgtctggagcatggcaggatagccaagttcagcaaagtgaggaccattactacgaggtcaaactccataaagcagggcaaagaccagcattttcctgtcttcatgaatgagaaagaggacatcttatggtgcactgaaatggaaagggtatttggtttcccagtccactatactgacgtctccaacatgagccgcttggcgaggcagagactgctgggccggtcatggagcgtgccagtcatccgccacctcttcgctccgctgaaggagtattttgcgtgtgtgtaagggacatgggggcaaactgaggtagcgacacaaagtt

SEQ ID NO: 280 - protein, 722 aa, Homo sapiens
MPRLTFQAGDPYYISKRKRDEWLARWKREAEKKAKVIAGMNAVEENQGPGESQKVEEDPAVQQPTDPDTVATTPEPVGSDAGDKNATKAGDDEPEYEDGRGFGIGELVWGKLRGFSWWPGRIVSWWMTGRSRAAEGTRWVMWFGDGKFSVVCVEKLMPLSSFCSAFHQATYNKQPMYRKAIYEVLQVASSRAGKLFPVCHDSDESDTAKAVEVQNKPMIEWALGGFQPSGPKGLEPPEEEKNPYKEVYTDMWVEPEAAAYAPPPPAKKPRKSTAEKPKVKEIIDERTRERLVYEVRQKCRNIEDICISCGSLNVTLEHPLFVGGMCQNCKNCFLECAYQYDDDGYQSYCTICCGGREVLMCGNNNCCRCFCVECVDLLVGPGAAQAAIKEDPWNCYMCGHKGTYGLLRRREDWPSRLQMFFANNHDQEFDPPKVYPPVPAEKRKPIRVLSLFDGIATGLLVLKDLGIQVDRYIASEVCEDSITVGMVRHQGKIMYVGDVRSVTQKHIQEWGPFDLVIGGSPCNDLSIVNPARKGEGTGRLFFEFYRLLHDARPKEGDDRPFFWLFENVVAMGVSDKRDISRFLESNPVMIDAKEVSAAHRARYFWGNLPGMNRPLASTVNDKLELQECLEHGRIAKFSKVRTITTRSNSIKQGKDQHFPVFMNEKEDILWCTEMERVFGFPVHYTDVSNMSRLARQRLLGRSWSVPVIRHLFAPLKEYFACV

SEQ ID NO: 281 - DNA, 22452 bp, Mus musculus
cttatccttcagagaaagaaaataaaggtgcagcagtagaaaaaatacatcagtggtgacacacgaaacatcttgtggtgcactcaattctccatgccagaaagaaagagagggagagggaaggaggaagggagggaagaagggagagagagagagagagagaagtcatgcaccactaacaataacaaaaaccagctgggatcaattcacaataacactggtgagatactgagagcaccaaactaagtcccgtgggaaaatacagtttcagccaagttcaaggtaaaggacaaccagtaagtaggtcttgggcagtgtgctatgcctgtgagagagggggaaaaagaatatcccccagggacaggggaagcactcacctccttggtagggccaatggaaaatgatgctcctccttcaaaggagcccaatgaaagcaatgacttctccactggacgccatgttccagggattccacccctaacacctgtgctcacagtgtctgcaaactgaaattcacaccaattgtcttccatttttgtctccttttcctgcctccaaaattcactagggagctgggcaagaggaacttcattgtatggaagtatctcaggcctgaaacagatctttataaataactgagaggaacttcctgcatagtcctccggctccaggcacatccctggcatccatgatcctgacttgggtggggccaactatgtagatttgatctctggagaaactggagtgtcaacatgatgatagttggaactaaggtacacatgcagtgactaaggactgacacaacactaagttcttcctgcaatgaggaatggttggaagataggatttcctaaaccaggtgctggatcagagagacagttgggtaggtcaagcatttgccacacaatcttagagtcaacgtttggatccccagaacccacataatactggatacagtagcatgcatctataactccagcaatcctactgtgagatgagaggtagagacagcagagtcccagaagctcctatgttggctaacctcagtgatgaacaacaaagaggttatgtttcaagcaaggtagtgagaactcacacctgagatcatcctctgacttccatgtgtgtgcagtgacacacacacttgcacacataaagagtgcaggcacagagagatttaaagaaaaaagttagaataaaaaggctgagtccttgcccatagtcctcagaggaaagagtaagaagaggccatggtacaagtgtgcactttggcctgagtgacacggaaattgttttttcagttctcatcaaacttttccctaagaccccaaacctcccaaatgacactataacgcctatgctctttgaagctgtgacaactagacatagtgattctgatttcctctgtgctaacaggaccttcccatatcaatgcctaccatgatgtgacactcacaaagatggctggagtggctaagcagaaattcttgcaaaacattttactagaggacagtgctgcagggtttactcttctatctctggataggttactggggtgggggtgggaggttactacagcaatggaagcaatgggaatgtaaactagtccagccactgtggaagttggtgtgcccatgtctcaaagaacccgatacagatctatcatatgatgcagcaccctagttggctttctgttgatgtgatgaaatgtcccccaaaagaaacttgaagaggaaagggtttgtttcatcttactggtgacagcataccatcaaaggaagccaaggcagacactcaagcagaggctgtgtaacagcagtgcttaatgcttgtttttaagcttctgttcagcttgctttttcataaagcctagggctacctgtctagagatggtattacccacagaggggtagtgggctcctacatcaattagcaatcaagaaagtgccttatagaaatgctgccatgtcaatctaatggaggaaattcttcaaggtttcctcttcccagaagtgctgttaacaagtgaaactatacaagccaacaagagccttttagacatttaccctgaagactcaaagtcaatgtaccacggagatccttgcacatcaatgtttaactatagaactgtccaacacatgggctatggacctgcctaggtgtctatcaataaagaggtggataaagaaaatgtggtgtatacacaccagaggtttttttttttggggggggggcagtagagggattatttcatttgcaggaaaacagatgcaactagagatcatattaagcaaaataactcagaaacaagagtatggtgtgttttctctcataggtacatcctagaagctgcactggttaggtctttgtcaattttacataggctaacaaaatctggagaaaactgaggtatcaataagatggatgctggattgaagacacatgcaaagattagcatggagggaactttaattaaagaacttcttctgtcagattattctagaacttggacaataagaactatctcatctccaagccttgaaaactagaaacctaatcaagctggaggtagagcagattccttatagcttaagagttggggtggtctaggtctctaggtctttgtgcctttgacttttaaacagttgtgttctcccacatctcttcctatcagattccttccatgtatatctccgtgtgtccaaattccttcagtcccattggacttgactcacaaaatgatcttacaactcacaaccagcatatgaggtcaccttctgagagtgcaaatggcagcactgttgttgtggaggggcaagactccatccctcactgttcttggtctcatggcaaaggttcatttcctcttcacatgcttgatacacagacccacctcgtcctagcatgtcaggtgtcttcacaggtgcagaattgcctccacgtccagatttttcacctgtctgtctagatcagattcagatacactcaaggcacacgtgatcttttaagcaatactgcccttcagtgcagaatctgtgcacccaaacatgttacctatccctaaatagcactatgggatgggcctggaatggaaatttcattccaaaaggagccgtcacgaggacaagtagaagtaaactccactattaggcaatgagaattttcacttgaacttgaatgtctccaggtctctcctttctactttaatcttccttcgccaaccacaaaggtttggcctatagctactcttgaactgatagtgtttttgatcccaactcaagaggaaatggataaaggtgagtccccatggagaaaagaaacacaacttcacctggagatagaatgactgggtctgtctagagctggcctgaaggacagttaacagagtagacagcagagggtggtgagcaaggacctaaatcaaattaacagagaggaaagagaccatagtacagcccttttaaggggtcgagtagggaattctgtgtaataagtgtgccgttgtagacatgcgaaccaagctactatgaagagcttcagggatccccactataggaatgaggcccatgctgctgtgggtttgtacttccagccacttagccatcactactcctggttagagatactcaacacaagtgaactgaacttcaacctgggttctgaggagcattggggccccattctcttcctagcaactcaaatttgctggtctaggagtcagaaagaggtagcatagataggagccagtgctagaacccagcagaggtggaggggtggagcctgcctgtcacggggattccagagaaataaatgtttgccacatctaagtgggacagaagttgaagcagtaaacaacattcaaacaccaatgccacaattaggtagccctgtccgaaaacatgcaatatccatgatgcagagaatgtcacaaaaataatgctttctccttacaatttaattggaatatttttcctagtattaaaagtatgaaatactaaagacaggaattggggccatcaagatggctcaatgtgtaaaggcacttgctgctaagtttgagagttcaagcctctaatcccacatggtaggagaagagcagaccaccaaaagttgttttctggcgttgtatagccacagcaaacaaataaatgtaagaaaataaaaaataaaaaagtcttactagctcatagactttatttaacaatgcagacaggagtgacctcggaaacatctcatgatggtctccccccacactgtctcttcctccctctgtacacagtagcctaaggtgacaagagatcaacccccttgctgtcttccttcctctgcccctcagccagcaaatgtttttgtcatcctgtggtacagcaatgtatagcttcccacccatagcaagaagcgccttctctctgcaagtaagccacctagtccaagggcagtacaaggccacttcttttccagtgtccgtgccccgtcttggtctttacccacaatgacacactcactgctaagagcacagactcttttgctggctgaagaatgactgagtgaatagaattcaggcttaaagaaaggtctggtgaacttcagtttatgccttcaaagctgtttctttatgagttccacttgtgcacacacaggccacccatgctctcacacacaatcacagtcacaatcatgttcaaaagtatgtgtattttctttcatacacaatgcaaagacactgtgtcaaaaggagatccgtgctcaaggaccacattcctgggagggggatcagccctctatggtccctcatagactctggctctgaggtttgcctagcctgtctctccatccccaaggaagaattagcataatatgcaggggccctcttccctccctactcctttagctcagaggccctccttttgggagtatactaggccttacaaacttcagcaacttaagagagtgctttcattatgaagtactatattacaacagcatcaccaagacacacacgtttaggagacactcccccttctcagcctcttaatacaaacattaccaatttaacttcttatgtgttaaccaaacccctgaggtggtcagtaaaagtctctccccaatctattttatacacacacatgtatcccttccccctcctcctgcaccctcccccaccacacttgcacaaggtatttgcagtagatctactcaccacgcccaaccttgttgggagcagccaggatgtcctcaggatgtcctgaggctgtgccacatccagacagcagagaaccagtgggtgtgaaaatgcaaacactaatggccttatctacagcttgctgtgtgaaaagagctggcttgaaaatgctgtgcactatgtagttcccctacatgatatccatagagtggggtgtgtgtgtgtgtgtgtgtgtgtgtgtgtgtgtgtgtttgggggaataaaatcaaggtatgctaaacgccagagaaagaagaggataaagagatggagcagaagattttcacctgaacactgggtgacaacagtgacggtgtaatggcacatgctgcgtccctaacattgccagtccagggatcatagctcacatcaagtgtggacacgtagctgtgagggttgaacactgcctcacagaccactgatatatgtgccactaaggtgagggatgtggtattagggccaggttgtgtgtgcatgagggcagaaggtgtcaccttttgtcattcccattcggttttgttattttgttgtgaacctcacactcctttctaaaaacaaaatctatttttaaaagaaacaagaatgcctagctcataataataatagaaataaatattaacatatcattcagaaagagcaagtgtgtagaatgttttgcttattatctacaagctgagggatacgtggtaagatctgggctgggggtcaggtagggagagacattggagccagttgtcaacacacggaaaactgcttcaggagctaaggtctcatccttcacaggactaagtttctccctctttgctggtacctcagtgttgcagttctctaaagtcgtatggatggtaatgggataggctagaagaatagaatctgcttaactctccagaaaatgaggcatgacatgagttatggccttttggtttccacatgtagacatgttcctggtcatgaggagaacatatatatatatcctttttgaagctccaaacctgggctgcccactgcttatacttcagtgggtcacgttgctgggtggaatgaagtggagaatagaaaaatgagagctcagtatgaagattcttcagtgtgtgcttatgaaacagtgattatatcccaggtcatgtgtgtgtgtgtgtgtgtgtgtgtctgtgtatgcatgtgtgtgcatgcaatgtgtgaatgcctgcctgtgtgtatgtgtatttgaatatatatgtgtatatacatacatgtgtgtgtgcatacaaatgtgtttatgtgcctgtatatacatgcctgtggggggtgggaggaagaacagagcagagagacttgtatttacagtccttcagtcagatcttacatctatagtataatctgtgagaagccttagcctttcagcatgtgtgaacatgaggatcaggtgaagagtccgaaacggcttctcagtctcattctgttcaagtgtggtgtgcatacacactcagtgcttgtgttcgtgttgtacccaaggtagagggagtccaatctgtgcccacagacacctctgagggacatttgtaaggacacagccacaacagaacaacttgtttagggagaaaagatgaaggaaaaaagaaggtcaatgaactggttagtttatttgttttaaaagactgagaagggggaagtgacttcatgtttccattagttaaatgagtcaactgtttaaccaggaatgattgtaagatttatctgtataatcaattacgtttttgagaagaaaaggaatattttatatttattctgatgttttaaactttaaatgattttgtaaaatatcttttatatgttagtattcgtgctaaaagagaaagataagttataattataaaagtatagtcatggggggcccagacaaatgtgaccattaagactctgagagttaattatgtactcagcaatgtgtatccctaacaggaaaaccacatacctcagccatgggcagagaaaggaagtgtgtattggatatgaaatggagtgtacctggattacactctgtagttcaaaaaacagcagaaacattttcattttaccaaataaaagataaaaactactaaaggctaagtaattcttagtcaacagtcctttcagtagtttactcctgctgttgttaataatctgatttttcttttagaaaagtgtatgctgttcctgtaagcatcgtgtagggcttcaaacacattccctttcttctttctttttaaaagaaaagttagacttagatttttctcttaggaaagaataaagtgtatacaatataattagaaaaataaaagatgtttacagatttttctaatctttttttcttttattcccagtccttgaataactagggatgacaaaaaaaaaaaaaaaaaaaaaaaaaaaacctgtgggtagaccactattatagaatatcaatctacctgatcttttgtgaaagccttcctaaatgagaagacagcaagacttgctctcaagcctgctcctccagctgccttccggaacccccaatctctgcaactgtttactaaaagacccagcaaggcctctggactcccacagcaaaatgcagccctcttatttgggatcctctttctccaacaaatgactctttaatctttgaacacaagttctgtgtgattttgactggtatccgccacccccaggagtgctactgccttctgggaaaacacacacacacacacacacacacacacacacacacacacacacacacacactgactctgtctgcctctcctgaggtcattcatcttctgaagctgtgcacaatttcatatcaggaacgtagcaaaattaggtgcagaatttaaactgccaaagattttcaaacacgttttctgttactgtataataagatggcaggtggtcacaagaggtagctcttgaggtgaaatgagttcgagactagcctgaggtgtgtagagtaagatcctgtctctaaacaaaacaaaccaagaaccgaaacaggccagaaagggatgtggaaggggagatgccaagaaaataaaataataagaatgacagtatatacccccatgcctgacaattggaagctgagatgaaatagctccctgtatttagagtgtagatttcccttgtgatggggactcgctggccccaccccacccttgcctgatgtccccattgctgggaaatcaggcagctaagaggaaaacaagagagaatgtctggtttgcctcaaagatggatttttacactccacatgggtttttctacatctccagacatcaggttaacccgtatgtaaattttttaggttccaatagccttaaacattaaaataaaatgccaacattattaagactgaggttaacttcaataatacacgtgcttggatcggtgcttttctttggggtgaatacgataagggtgaaatacagggacccctcccccctttttaaaaataaaatggcctatgaagacctggcaccattctatgtccggagtggggatgtgtgggagatgagaagtgtagtaccctgtgcagtacaccaacctgaaaggaaatatgtttagataattccactagtcccgggcggccgatttctcgggtgagcaactccgggtggggtgaggggctgtagatcttaagaaccagcccccagaactgacagtgggtaggtatgaggaaaacagggtgagcagccacgttaaacagaaagcagaaaggcttcgtttcattgtcctcagaagagccataggtgggtaagatacaacacaaagagaagcgagtttccaaggagcccggcaaaaccagtaggcaggagccaccgctccagcggcagccttagcaggcaaataagaaatatcttcgctttaaacgagagtgcacttcattttagctttggtttgtaccgttgggttaaaatagcaaatgacccagaaggtgcgtgctgggaggcagagctagggtttcaggaccgagctgcaggggaggagggcgtaggtgatggacagaggaggcgggacgcgggggagttggggaggcctatggagtagaaagtgggggaggggcggcgatgctgagtcccgggctgtttcaccgatccggcctgaatccgtgaactcctttccgaaccgctccggagccgcccggacacggcggtctccgaagaccgttactccagccgaaccggcagatgcgcgcgatccaggagggaaaacgagagggggagagacgggacaaaaccctgcgggtgcgcggggagggggggagggagggcccggcgaccgggctctagaaagagggagaaaaagaaccggaggatgagcccacgtgcacggtgccgcgcggtgtcgaagcgccaccttctgctggatagcggcgcagcgcgatcgcgcgcgggtttagggcgcgacgcgcccaggatgagcaggggcacccactcgcggtgcccgggtgggtgcatctgcactggggttcagtccatcgtcccgcgcccttgagtccgcgctggcgtctctcgctccgtcctgcatccgcccgggggacacgcgcagctgtgcgcactcgcggatttcttttgaaaaaataacatatttctagacaactccccccgccccccatctttgcaaactggccaggaggcggggctggaggtggggcccgtggttaataacgggagataggcggagtcgggaccagccattggctggtgggagtagtgatgtcacccatatgacaccctgataacgagttgagagagagccctcaactttttgcagaagaagcgcgcgcgcctgggagtgcttggggtccggcgcttgcggcggctgccaggagtgagagagcgagaaatcaagcgagtgagagagagagcgcgggtcccgggccgccgccgcctcctctccggtcgccgccgcagccgccgacgcagcagggaacggggccgggggggaggggggcagccgcggacgcgcgcggccaaggactttgcaacttgccggagaaggtggaggggcgggagggggaggggcgcccgcgcaggagaccgagcgcccagccccgccgcggaccatggtgcagcaggccgagagctcggaagccgagagcaacctgccccgggacgcgctggacaccgaggagggcgagttcatggcgtgcagcccggtggccctggacgagagcgacccggactggtgcaagacggcgtcgggccacatcaaacggcccatgaacgccttcatggtgtggtccaagatcgagcgcaggaagatcatggagcagtcgcccgacatgcacaacgccgagatctccaagaggctgggcaagcgctggaagatgctgaaggacagcgagaagatcccgttcatcagggaggcggagcgcctgcgcctcaagcacatggctgattatcccgactacaagtaccggccgcgcaaaaagcccaagacggacccagcggccaagcccagcgcgggccagagccccgacaagagcgcggcgggcgccaaggcagccaagggcccgggcaagaagtgcgccaagctcaaggcgcctgcgggcaaggcgggcgcgggcaaggcggcgcagccgggggactgcggcgcgggcaaggcagccaagtgcgtcttcctggacgacgacgatgaagacgacgacgaagatgacgagctgcagctacggcccaagccggacgctgacgacgacgacgacgagcccgcgcactcgcacctgctgccgccgccgacgcagcagcagccccctcagctgctgaggcgctacagcgtggccaaggtccccgccagccccacgctcagcagtgccgccgagtcccccgagggcgcgagcctgtacgacgaagtgcgcgcgggcggccggctctactacagcttcaagaacatcaccaagcagcagcctccgcccgcgcctcccgcgctgtcgcccgcgtcctcccgctgcgtgtccacctcctcatccagcggcagcagcagcggcagcggcgccgaggatgcagacgacctcatgttcgacctgagcttgaatttctcccagggcgcgcacagcgcctgcgagcagccactgggcgcgggagcggcggggaacctgtccctgtcgctggtggataaggacctggattccttcagcgagggcagcctgggttcccacttcgagttccccgactactgcacgccggagctgagcgagatgatcgcgggggactggctggaggcgaacttctccgacctggtgttcacgtattgagaggcgcagggctcctcgggaggcagtcgtggcggtcaggataaagaggatggtggggggagggggagaagatgctcatggtcagagagatgtggcgctgagaaattggaaacggtgatgaaatgttgttggagttaaagtgaaatgagtagttttaaacagattttccaagttttttttttaatttttatttttaaaaaattttttggtctccccactcttcccgtcctttatcgtgtctcaaggtagttgcacacctagtctggagttgtgatttttccccacccgtaaaaaaacgtgttttgtaatttctatttctttttcctgaaattcgtgattgcaacaaaggcagaggggaccgggcgggggaggggaggaggccccgctccggaaggcgctgtttgaagcttgtggctctttgaagtctgaaagacatcggcagaggaccctttagacggcacaactgttactctagggagttgatattttttttcttaagagatttaaaaaggaactggtgatttaaaaaaagaaaaacacaaaaagggaccattgtaacctttttattttattttcttttttggagggagaaagctgatgtcttctatgcatccgatttcttaaactgcagggagcttgaaaaaatgcagtctgtacaaacgcttacaaaaatcataactgtgaactgacttaagaccagagtttacttttcagatcaaattgtttatggttttacaaatgtgatttctacttggcaacctttttttggtaactcgttcccttatacctccttgattgaataccttacagcctagacctcagtacaaaaaggtattgaaacatttttgatacataacagacctcaatcttttttaaaaattaatatattttcaggcgtatttttgtacagtgaaaagggaacaatcttgctgtgttttttcagtaagactttcaggcacttcttcccttttgatttctttttctttttttctcttcttgtttttgtttttcctttttgtttgtttttttagcatgcaaatatgttggtacgttatgtcctggtttaaaaggattaaaaatttaaaagtaatccttgcatctaaaggccttgtggtttaaaaaaaaaaaaagcaaactttttttgtacagctatagtagagatttgttcaatatttgtaggtaaagatttattgaaaatggtgacctagacctcagagctgttcttagtttaagactgtatgtactgtatcatagtaggacctatgtatctcatcgctgtgatgtgtggacggggccccagacagaaggtttgaaactggatacgcgatttttatcaaaaagaaaaaggaaaggcacatagtttaaaattttctcattttgtgcaatataatctaaataaacagaccattgcatatttagtagcaaatggtggcgaagcagactcaatgcactgtcgaagtcaccgccggggtttttggttttttttgtgtgtgctgaagtctgtgtcttgattttaataaatcagcaggatcggatagaagctcgcatggcccttagtctctcccgggagccgcgtgttcaccgcgcagcggacgcgggtcgcggagggcggatgccgctttttggagcccttaggctgccataggttgcagcccggtgtcctcccttctcaccccgccctgcgtctccatccccgccgtgggcttcgcgctggtccgtgcctggcgagtctggagctagtgtccacagggctaggcctccgcttctggctttgggttttttctgttgttgttgttggttttttttttttttttttttaatctccacccccatccgcgggcggcatcgctgcgcgcgcgcgcgcgcgctcaatgagatacgagtggagagggccgcgcccttcagcgttatccacgcgggtggggcacgaggaaagcaaatgcgcctagagccgccttcacggtgcaggatggctttggtttctttgatggagcatttgcctcccggggcccggtccagccctcccctcccccactgccccctcccccccgccagcttgtccctcgtggtgtcccgcgcgcaagcccaactccccagggccgcgacgcacgcgaccgaggagcccttcagcagtgaattgaaactcggtgcccaacagcccgactccagacccacagaaaccattacggcgcgggcgctgaccgcggggacttgaccagtaggaatccaggtcggtgccccacgcaagacaggcactgcagatagagagctcgccctcacggagcagcgcgatctcatagcgcgtgggtggggcggcgacccggtgtggctttttcgggcttccctcgcccacccctccccccacagcgctctgctgtgagccacgcggggacctttaagccgcgaataatttcaccagcggtttactggggacagattctgaagcctaaggaaaaggcattctgagtgtcttgagttcttaacatttgcatgtgttcccgtttcccgtcgggcgttttccatggtgaggaaggaacttttaaataaattagaaaaggagtgaggatctggcttcagaatggaagcatagctgcaatttgtattttaaaattatgtggccgagtttcttggtaggaaaagaagagacagttcttggttggagatcaggaaaaaaagaaatcttttctttctttctttctttttttttttttttaaatcccagttagaactcaggaaaggcgcttgaatgcgcttttaacaatatttaaagcggtttcgacgaatgcattgtgaagaccattcccagtgaactctattgaatgtctaatacacaaggtattccagctactggccaggcttcaataaaaggttagctgcattttttttcctcctaagtaagtcttatttttaactgagcattgacagtatcttaaaatggtaacgtgggcgtgggcgttgtgtgcatggcagtctagccggttgggtaccctgctcctgtacctagttcacagactcgagtgcattttttttggcgagatttccatctttgaagaaacaaaaaaacaaaaacacctgaaccagcgttctcttattctttaagctgtggaaataatttccagtttctacattctcgatatgcatccttattaaaaagataatacgaatgaaaggcagtgtgcttaaagtgtgctttgcaaatacatgttatgaatgactacggtcactgggcaaattatttgtagaatgattagcctttagctagaaaaaaaaatcattgcagctcttttgggcctggatggttctttttaatgttaatggaggggaagtgatttaaatatgcatgctcttagcagtcaggatctgacttagttgttttgagagaaaaaaaaaatcaaaaggcaaggtctactttttttctctgggaattgaaaccacaatcatcttgatactagaacagtgtaagaaatggacatttgttcttcacttcagaattcaaatgagttttgcccaaggaatctgggaaatgaggcaaataagttgctcaattttcaagtagtcattcaatagaaatatactccatcactcggctttcttattctctgatggggtattctgtatagtctcactgttttctcctaatgggcatatgtatctttgtggacacttggaagagaggttttcttgtactctctcatttctagaatctttatactctttttcctgcaaggttctctgcttttaacagatttctgaggcaactatatttgtgcttttttcttatgtaggaagaccagcgaaactagcttactgagttgtcgattttatcagtagataaagaaactttgtttattacagtttcagggaaggtttttcaggatatttctcagttattctaagggccaaattttatataaaaaaaaaaaaaaacttcattaggaatgtcagtttcagataccctttgtatagcctgtggcctgcaagcacgacaggactgagccttacatgtgtccgaacaggaattcataagtccccaaagtaaacgtctccatgtaacgattcttgacgtgtttctctgagagttggcttattttgattatcaattctttctcactgtccattcctattgatttatcctgccatatctctttgggtttgatgagctcaacattttttgctctttgataacaactcaggttttggtttggggtttttcatgccccctttgtgtgttgcttatgttttccaccacagtataaaagtactgaagccaagccacttcccattcattcctttactgctgcctccctttccccaactcccaactcctaacacaccttcatttttttcccatcgtcttcttcttcttctttttttttaacactacctagatgcgttagctgcctgattagtttatctattccatgtggatgcagtgagtttataagagaatttcacaaacaagtagttttttagtgaacttaaacagaattttaaaggagacctatttttatactcaataaaagcacaaaacgtgcataaaatatagcatggcgtacaaagggaaatccactcataacgttccatgtatagaagtaataattttcttggatagcgatattctttgaagacccagtgcctgtctgcctgtgcccagacagggtggtttccacacactgggaacttccggttgctggcacttgacaaacacagttcaccacagccacaaagagcaataggtaggagctgaggtgtgcctcctgatgagcagtcagccactaggcaacctggatgtgcccatgtggaggctccagcctcactgtttgatcaaacttcttttatgtagtctcttctgtgaaaaaaaaaaaaaaaaaaggaaaaaaaaaaaaagaccaaacaaagcaataggacaagtttgaaaatgcatttgaacataggatttcctccagggtcctcaaagagatttaaaaaaaaacaacaacaacaaaaaaaacgtgacacttaagtttagtaggcacattacattcccctccccttcaaaaacagaacgcctggaaataatcaagacatagcgtaaaaagaattttgatcaaatggatattgacaaagggccctcgatcccatttctcttcacccagcttgtgttcaaaaaccttatgcctcgtcccctgaatcacacagggagaagcgtcctatgccattgtcatggactccccactttgtctacttttgctcttgtacatatgttgtgggtatcagttgttcccatttgttctgtaacacccttgtttgaatggactgttttgaaacggaggcctgtgtctcaggtatgggacacctagtggtcgtggcaacccatcccgtgatgctttgtttcccgggacagagccacctgaagtctgagagtagttatcagcatggcactgttaacaagtgttctgttttccaaggccgagaaaaaaagaaaaagaaaaaaggaaaaaaaaaaaagcaactttcacagccgctccaggtttgggagaggaatagctggaaagcccttttgtttagaagtctgagtgggttatggggggacttttatagagtttgcatgccagcgcaggacctgttgctgtcagacagagagaaggagaagctacctgaggcagtgcgctgggggactacgtaagtgtcccgtagcactagggcagcaaatgcatggtgaagtcatgtcttctggtagaggttatctagcatgcagagtgtagtgtgttgaaactgtatgacgttgctgtatcaaagttgtaaaattaagcattatttattgaaaactatgtatttttttgtaaaaacctgatcacacaagagagtatcagtggcttgtgctttgtgcttcaatcaaaccagcttcgtgaccgccctccttggaatgcagtgttaatgctcagggttgaattcatacactccaatgtctctttttgcaggagtttttcacagaggaatacatttgttcaaaagaccaataaaaatcgtgtgatcaatctccacatgtggcttttatgtgacttttttgttttgtttttgattttttttttttttttgttttgttttgttttttgtttatctttcccactttgcattgggtaactactgtgtgactcctaaagtgttgtctcgaagctgagagatttgaaaagtcttggtgtctcagcatccaaccaggacccacagcttgggcaggactggggccctcaggaagtgatgcttagggcaggctgcgagctgcccacagtggaataagcatggtgatcgtgtcttggtatttttaactggccaatagagtaaataaaaagcataggcaaagtatagaggggtaggttagcctgtttgtcagagttagaggatgaagggattattcaggggcagttgctgatgttgaatccaatgccagcaaactccattcctcagtgtcttttttttttcccctctataagcaatttacattgtaaatgtattttgacatagaaaccattctgtattgaaactcttgctataagatgtttttatgaaagcctgtaagtggtccttggaattattatcagatttttttaaagatgtgtttacatggtgagtgtttgttgcatattaattaaatttggttttgtagaaacatctgtgtcgtatcatgacggatctctatgggcacggcttacacactcacatgcgtggctcacacacccacttctgggcccctggtaagaccaatgtcaactttaagcaaaagaacaaatacccagctccatgtgttggacagctctctggtttttatataagacatttttacttcatagatgactttcaaagggtgtcaccctttcataggatttgacttttattttgaaagaaaacaagatagactacatacagcctttcatcttaaagtagatgattttttttgtaagaattcaacaaataaattcattgacatttctggctaaatttctattgataagactttttttttttttcctatgcttttgaacacgataaaatctcccagcagatgtagaatgtactgcagggtgggtgggggttgcctgtcacacaccatgactattccttcacataaccactgtaccaactttgaaattggctggtaactacagctgggaaagccccctccctaccagagtgtaaacaattacaagaattgaggaacttggtgaacttgaggtagccaatccaatttttgacatcagtcaaagcactaatttcaatagaattatttcttttaatactccagggtcaacaggaaaagaacgaggtcccagggaaacattctgccatgttgtacattatctgctagggcccaggacaaagtttatggtgacctgtgaacacacagctgcactgaatctaaggggtggcatatagtcatcagacaatgtggtccctcagggatggggatgcagctcatttgctatggtgtttgcctgatgtacacaacattcttggtttggtccccaacattgcataaactgggcatgatatcacttgcctgcaatcctaacacttgggaaggcagcggcaggagaaccagtcaagtcaatctgaagatagtaggcgccagattcaagtcagaccctttggatccccttttctaggaagctcaaccagctgtctttctgacttcatacacccctgcctgaaggacgttccattctctacctcctccttgaacaaatgcccctccttcctgggaccccagagagaaggcttgctggctacctgcctctggagcgaagctgctctgctctgggcccaagagttgagggtgaggacaaacaactcaaaagttggtgctttgctggccagggttgagttggggaaatggggaggaagtaggaagggaagactgtaacctgaaatgtcagagtccagacaccaagaagagtggagaaagcagagaaatcatccaagaagcatcctgagcctacagttagacagagaaaagtcccagacaagggggagcccccttgacgccaccctttagttaggctgaggtcactgctagctcttgaagttcactaggcatctgttaattcactccacacatacacacttaatttttgctttgaatggcaatataatcaagcaaaaatgaatccactcccttggggggtgcagtttgcactaagatatcaatggaagccccccagaatgaggcctggtagtgggtatggcgtgtgatatcagcttcctttgtccttagtccagcaaacatgtacacaggccttgctgtcataaagaaaggcaaagggattcctgtgtccttactggtcaccacagctgattatagttccaggtttggaagaacctaagttattcatctttccccatatatgtggccatacatctatagccatatttttcccgggatccttgagaagatgtacatggagtttaagcagctgaagcactaggaaggcaggtaacacacctaacacaccggggagtacacggagggagttaccaaaactcacactaagttttcctgcactcacaaactggatattgggctgccctctttacattttagatttgtttatgagacacttcctccttgagacatttttggggacttcaaggtggttcacagagttaaaggcatttgctgtgcctgagtggggtttaatcctcagaatccacagaaaggagagaaccagctttacaaagctgttctctgtccctgccacacatatcacacacacacacacacacacacacaactatggtgtgtaatcaacaaaccaactggaatgactgctaagctttctgctcagacagaacctttgttgcttcctattctagaaatttctccacccaagtgctcaaccgcctggcttcccctgtacctctgggtttcaaagagtggcatcaacacaacgaactcctcaaatactgtttgttcctccttccctcctgagagtttggtttttagtttgctaaacacataggttataagtataagtagacatgtagaggggtgagttgagaacatgaagccagagtcacaaggaatgtgaagagatgaagaaagagaaagaggaaggaaggggagtaagaaaggtaaaaaagaaaaaagaaaggttaatttcacagggacactatagaaagcattcaaagaactcacagccagagactgccttgtgttgagcgttgagatacgcatctgaattcaaatcatccccagctcatctctgtgttgtgtcatattgtgaaactcaggcttcaatgctagagaggctaagtcatcagaaaaagctccagtcgggctcatcctgtcatttacaagaaagcaggaaagtatgaaatcctgtcctcagtcattcacctcccagttctaagcagaactgagttctggggagaccactttgccgaactgctcttccctcaggaatgctttcctaacacaattatgtttggtccaagctctagagccttttgatttgtaatcagatagggtgaacattttcttctgtctggtgcctggggacttctcctgagcaggcaatcttcatcttcatatagaccagagttcaatccagtgcagagacagctagactgattcaaagagtttattgaaattgagagtttgagcctagtggaccaggagttatagggtgtctgtatggagtgagtagagggccttggggaggaggagtagcctgaaacaatggatgtttcctagaactgatccagactgtaggtccaccaccacctaggatacagtgagacagtgttctgcactagggtaaagagaagatggattaagagagttactcaaagaaaggtgagtatgagatgcaaggagaataatatttgattgcattctggttaagaaaaggggatcagggaggagagaggtgtagtcagtaaccccaacatccatagggtagaagaggcggtggcagaggactgctgaagggatggtgtgaagagaagcctggacttagtgtctttggctctttctgattagatcatgtgggtgcaggccaagtcttgagcctgtgatcttggggcctcggtacagctgggagtgagagcctaaggtgacctgcagccttagaagaataaactccacagtctgaagaaggtggttttaactcttcttctttctaacctaaagggccattcaggaacacgagatcctccagtggcagcttctcctggagctcccgccaaagtcagtcctgggggcggggcaggggtaggactgtagtgtgctggctggccagactcactggcctgcaccccaaacctatgcaccaaacccaccaagtggacagggagaataatgggattcccacaagctccccagaaccagggtactggaaagataggtaggtgtggataactgagctacaaaaccagtcaaaaagagacagaaacaagactcctggtttgggctcagagcctgacaacagggaagagctgagcatctctgacttctttgtatttctttcctcataagggggcaaagagcaactaactatatgcagttaaatgcaggggcaggagtctgctctcccttgtacagtgggttttcagccatagttttaggtttcagtaatgtctgatggttccattcaccggcttaaaaaaataaccaagatctctaaatccaccatggaatgagtggggtgtcagtattcagggcctgtatggtaactcattacagagagtggagagtagtccttctgatactccgtggagggacagaagcagcagcatgaacctctgcagctatctgtcaataaagcatggagacgtagaggaccttaaaaaagctagagtcagaaataatgtttgaacatctttaaacaactccatcgtgacaaaacttctgaaagcctttgaaatctgtgagcaacttcatggaaagagcatgccttgatgactgggaaagtcccttgcactgcagtggtcttcagagaggt

SEQ ID NO: 282 - DNA, 2452 bp, Mus musculus
agcgcgcgcgcctgggagtgcttggggtccggcgcttgcggcggctgccaggagtgagagagcgagaaatcaagcgagtgagagagagagcgcgggtcccgggccgccgccgcctcctctccggtcgccgccgcagccgccgacgcagcagggaacggggccgggggggaggggggcagccgcggacgcgcgcggccaaggactttgcaacttgccggagaaggtggaggggcgggagggggaggggcgcccgcgcaggagaccgagcgcccagccccgccgcggaccatggtgcagcaggccgagagctcggaagccgagagcaacctgccccgggacgcgctggacaccgaggagggcgagttcatggcgtgcagcccggtggccctggacgagagcgacccggactggtgcaagacggcgtcgggccacatcaaacggcccatgaacgccttcatggtgtggtccaagatcgagcgcaggaagatcatggagcagtcgcccgacatgcacaacgccgagatctccaagaggctgggcaagcgctggaagatgctgaaggacagcgagaagatcccgttcatcagggaggcggagcgcctgcgcctcaagcacatggctgattatcccgactacaagtaccggccgcgcaaaaagcccaagacggacccagcggccaagcccagcgcgggccagagccccgacaagagcgcggcgggcgccaaggcagccaagggcccgggcaagaagtgcgccaagctcaaggcgcctgcgggcaaggcgggcgcgggcaaggcggcgcagccgggggactgcggcgcgggcaaggcagccaagtgcgtcttcctggacgacgacgatgaagacgacgacgaagatgacgagctgcagctacggcccaagccggacgctgacgacgacgacgacgagcccgcgcactcgcacctgctgccgccgccgacgcagcagcagccccctcagctgctgaggcgctacagcgtggccaaggtccccgccagccccacgctcagcagtgccgccgagtcccccgagggcgcgagcctgtacgacgaagtgcgcgcgggcggccggctctactacagcttcaagaacatcaccaagcagcagcctccgcccgcgcctcccgcgctgtcgcccgcgtcctcccgctgcgtgtccacctcctcatccagcggcagcagcagcggcagcggcgccgaggatgcagacgacctcatgttcgacctgagcttgaatttctcccagggcgcgcacagcgcctgcgagcagccactgggcgcgggagcggcggggaacctgtccctgtcgctggtggataaggacctggattccttcagcgagggcagcctgggttcccacttcgagttccccgactactgcacgccggagctgagcgagatgatcgcgggggactggctggaggcgaacttctccgacctggtgttcacgtattgagaggcgcagggctcctcgggaggcagtcgtggcggtcaggataaagaggatggtggggggagggggagaagatgctcatggtcagagagatgtggcgctgagaaattggaaacggtgatgaaatgttgttggagttaaagtgaaatgagtagttttaaacagattttccaagttttttttttaatttttatttttaaaaaattttttggtctccccactcttcccgtcctttatcgtgtctcaaggtagttgcacacctagtctggagttgtgatttttccccacccgtaaaaaaacgtgttttgtaatttctatttctttttcctgaaattcgtgattgcaacaaaggcagaggggaccgggcgggggaggggaggaggccccgctccggaaggcgctgtttgaagcttgtggctctttgaagtctgaaagacatcggcagaggaccctttagacggcacaactgttactctagggagttgatattttttttcttaagagatttaaaaaggaactggtgatttaaaaaaagaaaaacacaaaaagggaccattgtaacctttttattttattttcttttttggagggagaaagctgatgtcttctatgcatccgatttcttaaactgcagggagcttgaaaaaatgcagtctgtacaaacgcttacaaaaatcataactgtgaactgacttaagaccagagtttacttttcagatcaaattgtttatggttttacaaatgtgatttctacttggcaacctttttttggtaactcgttcccttatacctccttgattgaataccttacagcctagacctcagtacaaaaaggtattgaaacatttttgatacataacagacctcaatcttttttaaaaattaatatattttcaggcgtatttttgtacagtgaaaagggaacaatcttgctgtgttttttcagtaagactttcaggcacttcttcccttttgattt

SEQ ID NO: 283 - protein, 460 aa, Mus musculus
ERERGSRAAAASSPVAAAAADAAGNGAGGEGGSRGRARPRTLQLAGEGGGAGGGGAPAQETERPAPPRTMVQQAESSEAESNLPRDALDTEEGEFMACSPVDESDPDWCKTASGHIKRPMNAFMVWSKIERRKIMEQSPDMHNAEISKRLGKRWKMLKDSEKIPFIREAERLRLKHMADYPDYKYRPRKKPKTDPAAKPSAGQSPDKSAAGAKAAKGPGKKCAKLKAPAGKAGAGKAAQPGDCGAGKAAKCVFLDDDDEDDDEDDELQLRPKPDADDDDDEPAHSHLLPPPTQQQPPQLLRRYSVAKVPDTLSSAAESPEGASLYDEVRAGGRLYYSFKNITKQQPPPAPPALSPASSRCVSTSSSSGSSSGSGAEDADDLMFDLSLNFSQGAHSACEQPLGAGAAGNLSLSLVDKDLDSFSEGSLGSHFEFPDYCTPELSEMIAGDWLEANFSDLVFTY

SEQ ID NO: 284 - DNA, 21239 bp, Homo sapiens
  misc_feature (1)...(21239): n = A,T,C or G
ccctcaccaactcttggggacttggtgtgggagtcaagactcatcagcgccaagctgtgggctttcaatttggtggggagtgcagaggagattgggacacacagagactggagcaaaactctagcctgaacacacggaggctgggccctggccagagctgccctggaaggagagcgagcagtggcctctcccacagtcgggtggtgcaaacactccggatatgtccctgaagcagaggcatgtgatggaaggaagtggaacagagccaccctggaatgaccttgtcagagcaggccttgttgtaagtgactatatcaagggcgtcaagcaagggtgttcacacctaggaagggcacccaaaatggaacctcaaggatcatctggagacgcaattccccacaacagagaaggtggccctgctgcgatgggttcattcttataataacccatcaaggaggcccagcagctggaatcctggcatgtcaaggggcattcagcagccaagtgagaagcacacagcatcggctacatgaagatagactttgcccctttctcttctgagcccttcccatctcctggttccccagcagccagaaggcaggacggggaggcaggagtgtaaaacaccagaactgccaccttgtctctaattcacagtcagcccaagctagacctgaggggggatctctaggctggtgggaagagaatcacagagctgtgtcctgatcacactgcacttcatccagcctgtcaagtgcaccatttacacacccaagcacagatccaaatggtactcgggaccaaaggaaaatcatgttaatttttattgtaacatggactctccgctgctgtgggagaaaaaaataatgaggaatctgatactcacccaggttaaaagagcattactgagactgaagtaggctgtggatatctgcaggcaacttggattgctttatgtgcctttcttacattccacatttctatgggaaatatgtgctgccttcaaatggaggaagagaaaacaataaataccacaaagtaccaaagtcacaactaaataactatactttaacatataataaacccacagacttaagagaatgaaaccaaaataattttccctagtttacgattctgtagcagtgacatttttcgtcctggaaaagctacgtaaggtccagcgcagaagtgaccttggaagtcacctagtccaaaatgttcgtgctagaggtgaggattttaagggccaaggtgatcaacccctgttcctaagatcacgtggctgatttatgttaggatgggggcaggagacagtctccctggctcagacccctcttccctcacaggtgtgtctctctaaggcactactcacctcttagtagaagcctgggtcctcttgccacccatcctcccctcctcccccttgtctgcaaacgcccttcgattttgcacagcagctaaaagctaccctaatgatgaccacaaattggtagaatttttagtgaatgccctctccaaggaaaggtcactgtatttcttgttcatgttatgattacttagaatttaatggttacctgtgcttcacacatctctgcctataccttactttatttggaataacaaaagtaatgtaagtgttttcaaagctgacagacagagacagagtacagaaagagctattgatgcatcgagggccagaaagaaaaacaacagcagacacctaagttcaagagtcaattacagcaaaatgtagttgattacagggctcatgggtcgcggggagtgggtaaagcaacctggccacacagcttggtgatttagaaagagtcctggctagggctttccctcagcctatcaaggtggaggggagacgctgcacctgccaaagccgatgattccctgttcccggtgaggactatccacagacaccctcctcctgcacttgtgcttatcaaatcccagaaatctaccggacacgtgtttgcctgagttaccagctctccccatcccctcttgtctgtatcatcgaaaacaatgacacattcatagctattcacatggatgttttctctagctaagaagtgattaagacaaacaaatcaggataatagccatgttttgaagaaaccagatttggcaaattttaaaattgtgctttcaaaattgactattcatttctttttatattacacttccaaacacacacatacacacttaacaatcacacatttggaaccatacatgtcttctttggtgtataagacaaagatactgatagaaagggagcaatgtctccaggagacactggcccctctcccttcatgtgtagactgcaactctaggacttgctctccagcactggtgcaggctccgcctctgtctttgatttagatgggagagggcaggagccatctccccaccccagcccctaaagccccccactctcttttttggagctaagagagcaggccacactggacgatagtgctgcttgctcaacaaaaaaaataactgttttgggggaaattatttaacttcatttaaaaattccctgagttttctagttaaatgtcttttttagagcatattcctcccactaaaaaatggttgaataaatatatttttaataaaaataaggtttgtttaaactgtaaaagataggaagttctagccaatgcctggttaacaggaacagtgtgaacacgtgaaacagtgtgatctgaaaccacagacatccctcttggtgttagctccaatgttgcatgtgtatattctgtgtgtgtacatctgtgtgtgtgtgtgtgtgttcatttgtgtgctgggtcatgatgtaaaaatccatttcatatgtcagatcatagtcaaaataagtttgaagcccctgccctgtgctatcctgccctgctgatactctgtgttttccttaattgtgacaaagatgaaactacagaggcaaaacgagaagagtcatgccttgcttgcattgcaaagggacgtggattttgtcctaatggtgaagggcatcctgagcatgacgctggcaagtcccatggtccctgttgcatgttggaatgaatagtctgtctgcagagtggaaacagggacatcagtttggtgtccattactaaaaaatgtgtaaagcccagaggaaaactgaaacatacacactgatggtcaaaacatgcaggaggaagtgaactcaggagtgactcgggtaggagaattgactgagcttactggggtatgtgagcaaatatgaaaatcccttcataacttacacaatagttacggtatgccaggaaccctttcaggcacagaagaagaaatattaaaataataaagactacatttgtaaacgttctactgtgcgcagcactgttctaagcacttcatatgtatttaatcattatagcaattctaacaaatcaagcaggacctggactgtgtctctgcacacatgagtgtgtgtgtgtgtgtgcgcgtgcacgcacatgatggaatggttactggtatcctattttatagactggaaaacgaaggcacaggataagttaaataacttgtgtaaaagacactatcaagaaaatgagaaaacaagccacagactaggggaagttatttgcaaaagacatgtctgataaaagactgttacccaaaatatacaaagaagtcttaaagcttcacaataagcacatgaaaaacctgatttaaaaaaaatgggccaaaaacctgaagagatatatcactaaagaagatatactgagggcaagtaaatatttggaaagacagtccatctcatatgcctagggaaatgtaaattacaacaaaaatgagatagcacttcagaccgagtagaatggctacaatctaaaatagtgacaacagcaaattctgacgaagatgtagaatagtagaaactctcattcgttgctgttgggaatgcaaaatgggacagccactttggaagacagtttgaaagtttcttatgaaattatacaacctcttaccacacgatagagcagtatcactctttgatatttacccaagcaagttgaacacttacatctacacacaaagctgcacaaggatgcttgtaacagattttattcatcattgccaaaacatggaagcagccatgatgtccttctgtaggaggatggataaactgtggtatactcagacaatggaatgttatgtattgccaaaaagaaatgagctatgaagtcataaaaagacatggaagaacataaaatgcatattgttaagttaaggaagccaatctgaaaaagctacatactgtatgattccatatatttgacattctggaaaaggcaaaactattgccatagtaaaataatcagttgttgccaagggcttggaggggtgaaggatgaataggtgggtggaggccagatgattagggccatgaaaataatctgcatgacactataatgatggatacctgccattatacatttatccaaatccacagaatgtacaacaccaagagtgagcctaatgtggactacgcatgttggatgattatgatgtgtcattgtggatgcactgatcgtaacacatgtaccaccgagtgggggtggttgtgtatgtgtggggatagacactatgtggaaggctctgcattttccattcatgtttgctgtgaacctcaaactgctctagaaaataaagtctatttaaaaaaatagaatacatatctcatatgaataatttcaaaagacgtgaattttggaggcagtacgtttgtggaattatctgggcattgataactaaaagtcaagcgctccatgatgagagccacgcgggaaaaagaaaagatagtggaaccagaattttcaatccagggcagaacgcttctgagccgtaactctgaacacctaagccagtgtttttcaaacttcagtggtgcctcattaatagtgggttttaactagcatttacagaaatggaatggaatggaatagaataaaaaagagtatgaattgcacataaaagagagatactgatttgtgacgctttggtttctgctttatatgtgtatagcatgagtactgggtcatgatgtaaaaaggtgttttataaaataggtcatgatcaaaataaatttccaagccgctgccctgtgctgtactgcccaactgctctggctttcatggatcacactctgcagtggtcaattcagagaataaatgagtgaaaagcttaacaacattattttagctattgaaacatgttctgatgagccaaacagggtaacagcatccactggttcattgtgtgtgtgtgtgtgtgtgtgtgtgtgtgtgttttcaaggtaggattgttcgatctatactcattaccaggtctgaggaacacttaagaaggaataagaaggaatgtccagtagacagaatataaccagatccaaattcaagatttgaggctgaagctgagataaatagatacagctaacaataaggagtgaactcatttcaggagaataggtaaagggagaaaaaaggaaaggatcctaccttataacttcatttcagagatggggaatgcatgtggttgcaatacttctaaaaatggtggtcaatccatcagataagtcaaatatttacccagtgatatttttagcatattatttgcttagaaaaatgcttctttcctaagaaaaagggacacttcttactctggctgtgttataattttgagagatatcgtgaaatatctcatctctttatgtaatagtccttttacgtgacattttctttgtaaagatggaattatgaaaaggtaaaaatcaccataaaaatagtcatttgtgcctctaatcagatgtgactcttaagattctgaacattatgtatccaacaatgtttatggttaacaaacaaactacatatcttgcttataaataagtatatagacagacacacacaaaaatgagtgaatattggctctaaaaagataaccaatgatcctaattatgatatacattcagtggcttaaaaaacagtagacctatttccattttactaaattaggttttcaagaggtgcattattaaaggctatattttctatttggtagcctaaaatttctctaaatagttggttactgttaatggcgcaaacatctgttttcagaagtaactattattcctgtaagaagcatgcgtactctcaaacatgttcccatatttttttttaaatgctatacttatttaaaaattttcccttagggagcaaaaataaagtatacagattatcatttttttcattcctcactcgactacgtctaacaacattaagtatgtggggtgagtccatgctacaaaatagcaatctagttaatctcttgtgaaaattgcctggcctctcctacatgacaggggggattcagctgtagcacccgcctgtgccgccttcagtgcctgctttagcaatcccaatctttgctttatcttctccaacaaacggctcatgttgccttgaacagaaattatatttcttgttcgaaagagcagattttaacttttatttcctctaaaaagatcgcagcgctatgagaataaaatctattatttttcactcctactatattcagatcattctcattttaaagctaagcatgatttttgctatagcgtaaagatagcaaatcaatatggaatttgccaaagattttcaaatgcattctctttccgaggcccaaatggtaggtgccctcacactttgcaagcaaataatgaagctgagctgaaatatttcaatccttttctctagagtgtggatttgtcctgcagttgtggggaggtgggtgtaggttcaccttgtgctccaccccaccctccctcccgtggtgttcccaatagctgaaaaacgtgtgagctgtaagagaaaaacaagacctagtgctagccgtgcgggagtgaagatgagttttcacacactgccttggattttatacatctccagactttaagtcacccagtatgaatgactgtaaattcttttggttcctatggccctggaaagaataaattgccagcattatcaagatttaagttggtctgaatattccaagtattcgatgcagtgtttttctttaggatgagtcggggaagtgggggacgggggcgggaatggcttatcgcaatggcggtaattttttcaaatcatgatctgtgtaaaacacggtattattttatgatattagaatcctcagagaagatccaatacttaagaaatgtagtattaattgcaggagggcacctgaaaggaagcagattcggataattttcccagtcctacacggctgatttctctggtgaagggatccgggcagtgtcttaggaactgctcaaagttcccagatacccagtgctggggggtgtggagaaggcgagggtggcgacagaccatacctatgaagcggtgattttctttaattgcccccagaatatccgtagaggtagtagggactcaataaagaaacacaaaggagacgaacacggcacgatcgccggggtccgcggctgctctgcgaggcccagcgcgccccaggtcgcggctccccggccgccagcgcacctttccatctccagggaaaatatttagacgggaaactcgagtgcaccttattttctctttggtttatgagtgacccagaaggcttctagctcacaatcgcacgatttcaggacgaggctgccggagaagcgctggcgaccgaggatgggggaaggacaaagaggaagaggaggcctgggaaggagaaaggagcggcggaggggcggggagaggacggggcggggagaggaggggcggggagcagagggagaagggaaggagggcgccgggcccctcgcagggacgccgggcggggcgcgggcttgctggagcctgcgggacccagagcccgctccggagccagccctgggagtggccagcttgaacccgagggccccgcagaccgttactccggcccccgcccggggcggggcgcgcgggggcgcggcgcagcccaacccgcacagccgcgtccccaaacaccaccgaggagggaaaacagacggagaaaaaggacaaaacagaaaaatgcaaaacgggggagggagctcaccgcctctcgagctttaaattgatttctttgccttacaaaaagggagaaagggaaaaggagagcagagcccacgtgccgggaaggttgctgtcttcaagcgccaccttccgtcggccagggccgccgcggggctaccgggcgggctcggggcggcgacccgggggagcggccgagccccgcgaggggctcgccggggagcagctgcgcccaccccggggcaggccgggcgcggctgaccgcgagccgggcggaggccgccgtctcaggctgggcgcgtgcccgagtgtgtgcacccgggggagtgagcgcgcgccgtccgctgtcgccgtcgggcctcccggggactgggcacaaaggcgcgcggggcctctcccgggacccggtcctcggttagcgccggcgcccgaaccatcccggttcgccccgggccgcccgctccccgtggtgccgcgcgccgcttccgagcatcccgggaacaggcgcatctgtgcacacacgcggattttttaaaaataacatatttctagacatgcctcctctccccccacccccatctttgcaaagcagcccggagggcggggtggaggggcggggcctccgagttaataaaggaagatgggcggagccggcccccagccattggctagctgggggagtgatgtcacccatatgacaccctgataactagttgagagagagacctcaactttttgcagaaggagcgcgcgcgcctgggagagctcggggtccggcgcttgcggtaggagccacgagccggagagaggggtcccgggctgcctcgaccgccgtcgccaccgcctctacctgtcgcgaccgcagctcccaccgcgccggcggccgtcgccgccgaannnnnnnnnnnnnnnnnnnnnnnnnnnnnnnnnnnnnnnnnnnnnnnnnnnnnnnnnnnnnnnnnnnnnnnnnnnnnnnnnnnnnnnnnnnnnnnnnnnnnnnnnnnnnnnnnnnnnnnnnnnnnnnnnnnnnnnnnnnnnnnnnnnnnnnnnnnnnnnnnnnnnnnnnnnnnnnnnnnnnnnnnnnnnnnnnnnnnnnnnnnnnnnnnnnnnnnnnnnnnnnnnnnnnnnnnnnnnnnnnnnnnnnnnnnnnnnnnnnnnnnnnnnnnnnnnnnnnnnnnnnnnnnnnnnnnnnnnnnnnnnnnnnnnnnnnnnnnnnnnnnnnnnnnnnnnnnnnnnnnnnnnnnnnnnnnnnnnnnnnnnnnnnnnnnnnnnnnnnnnnnnnnnnnnnnnnnnnnnnnnnnnnnnnnnnnnnnnnnnnnnnnnnnnnnnnnnnnnnnnnnnnnnnnnnnnnnnnnnnnnnnnnnnnnnnnnnnnnnnnnnnnnnnnnnnnnnnnnnnnnnnnnnnnnnnnnnnnnnnnnnnnnnnnnnnnnnnnnnnnnnnnnnnnnnnnnnnnnnnnnnnnnnnnnnnnnnnnnnnnnnnnnnnnnnnnnnnnnnnnnnnnnnnnnnnnnnnnnnnnnnnnnnnnnnnnnnnnnnnnnnnnnnnnnnnnnnnnnnnnnnnnnnnnnnnnnnnnnnnnnnnnnnnnnnnnnnnnnnnnnnnnnnnnnnnnnnnnnnnnnnnnnnnnnnnnnnnnnnnnnnnnnnnnnnnnnnnnnnnnnnnnnnnnnnnnnnnnnnnnnnnnnnnnnnnnnnnnnnnnnnnnnnnnnnnnnnnnnnnnnnnnnnnnnnnnnnnnnnnnnnnnnnnnnnnnnnnnnnnnnnnnnnnnnnnnnnnnnnnnnnnnnnnnnnnnnnnnnnnnnnnnnnnnnnnnnnnnnnnnnnnnnnnnnnnnnnnnnnnnnnnnnnnnnnnnnnnnnnnnnnnnnnnnnnnnnnnnnnnnnnnnnnnnnncgacgacgacgacgacgacgacgagctgcagctgcagatcaaacaggagccggacgaggaggacgaggaaccaccgcaccagcagctcctgcagccgccggggcagcagccgtcgcagctgctgagacgctacaacgtcgccaaagtgcccgccagccctacgctgagcagctcggcggagtcccccgagggagcgagcctctacgacgaggtgcgggccggcgcgacctcgggcgccgggggcggcagccgcctctactacagcttcaagaacatcaccaagcagcacccgccgccgctcgcgcagcccgcgctgtcgcccgcgtcctcgcgctcggtgtccacctcctcgtccagcagcagcggcagcagcagcggcagcagcggcgaggacgccgacgacctgatgttcgacctgagcttgaatttctctcaaagcgcgcacagcgccagcgagcagcagctggggggcggcgcggcggccgggaacctgtccctgtcgctggtggataaggatttggattcgttcagcgagggcagcctgggctcccacttcgagttccccgactactgcacgccggagctgagcgagatgatcgcgggggactggctggaggcgaacttctccgacctggtgttcacatattgaaaggcgcccgctgctcgctctttctctcggagggtgcagagctgggttccttgggaggaagttgtagtggtgatgatgatgatgataatgatgatgatgatggtggtgttgatggtggcggtggtagggtggaggggagagaagaagatgctgatgatattgataagatgtcgtgacgcaaagaaattggaaaacatgatgaaaattttggtggagttaaagtgaaatgagtagtttttaaacatttttcctgtcctttttttgtcccccctcccttcctttatcgtgtctcaaggtagttgcatacctagtctggagttgtgattattttcccaaaaaatgtgtttttgtaattactatttctttttcctgaaattcgtgattgcaacaaaggcagagggggcggggcgggggaggggaggtaggacccgctccggaaggcgctgtttgaagcttgtcggtctttgaagtctggaagacgtctgcagaggacccttttggcagcacaactgttactctagggagttggtggagatatttttttttcttaagagaacttaaagaactggtgatttttttttaacaaaaaaagggaccattgcaacttttgttaattaaatttttttttttttttttttttttttttttttggagggagaaaactgatgtcttctatgcatccgattcttaacaaaactgcagggagcttgaaaaaatgcagactgtacaaacgcttacaaaaaaaaaaactgtgaactgacttaagatcagagtttacttttcagatcaaattgtttatggttttacaaatgtgatttctacttgccaactttttttttgtaacttgttcccttatacctccttgattgaataccagacagcctagacctcagtacaaaaggtattgaaacatttttgatacataacagacctcagtcttttttaaaaattaatatattttcaggcgtatttttgtacagtgaaaagggaacattcttgctgtgttttttcagtaagactttcaggcacttcttcccttttgatttcttttttttcctctgttttttagcatgcaagtatgttggtacgttatgtcctggtttaaaaaggattaaaattttaaaataatccttgcatctaaaggccttgtggtttaaaaaaaaaaagcaaacttttttttgtacagctatagtagagatttgttcaatatttgtaggtaaagatttattgaaaatggtgatatagacctcagagctgttatcttagtttaaagattgtatatgtactgtactatagtaggactttatgtatctcatacgctgtgatgtggatggggccccagatggaaggtttgaaactggattctcgatttttagcaaaaaagaaaaaaaaaaggcacatagtttaaaaagtttctcattttgtgcaatataatctaaataaagtacagaccatctgcatattttgtagcaaatggtggcaaagcagactcaatgcactgtcgacatcattgcctgttttttttttttttttttgtgctggaagtctgtatcttgacaattttaataaatcagctggaactgatagaaactcgcatcgccaatagtctctatggaagtcaaactggaggtcctgttgtcgcagagcattcggtggtgaggctgttgtgtgcgcggatgaggggaggtggcaggagagaattctacatttagggggttaggctgaaaagtgttcaattagcaggctgatttctttttcctcttccgctagttgtgaaagacaggggaagggtgttctttctctctgccctccctttccatctccagctccccatttcctttctcacctcctcctccactccctgcctcttctccccacccatcctggcgggcgggctgcgcggaggctcgggagctggccggggaggggcggatggaggggcctgggttgccagctcccttggtcggggtcctgctcgctggggcttgtgtgttctctgcggcgggccgcgtccccgctgagcctcgcggtgacagccgcctttggcagcgagcgctcggggcacttctatccccgcctctcaaagggtggggacagccgtttccagatttgaattttttctgttctttatttttaacgctgcatcttcgcgtgtgctcagaggtggttgttggcggagaacgccgccgcagtgtttgacctctagcggtgaagggggaaggggaagaggaaaggagagaagtggtcggtgtctgtttccttctgtcccccggggccgtggagctgtcggagggaaggaggacggtgcggggccgcagggggcgcggggcgcggcgggacccaggctacgagcgggagggaggcgggagtcaggggaagacgcggcaggccggccgagggcaccccgaggaacatggcatggcctctgtgcgatccgagtcgcggtctccggggtgcctgggagggccgaannnnnnnnnnnnnnnnnnnnnnnnnnnnnnnnnnnnnnnnnnnnnnnnnnnnnnnnnnnnnnnnnnnnnnnnnnnnnnnnnnnnnnnnnnnnnnnnnnnnnnnnnnnnnnnnnnnnnnnnnnnnnnnnnnnnnnnnnnnnnnnnnnnnnnnnnnnnnnnnnnnnnnnnnnnnnnnnnnnnnnnnnnnnnnnnnnnnnnnnnnnnnnnnnnnnnnnnnnnnnnnnnnnnnnnnnnnnnnnnnnnnnnnnnnnnnnnnnnnnnnnnnnnnnnnnnnnnnnnnnnnnnnnnnnnnnnnnnnnnnnnnnnnnnnnnnnnnnnnnnnnnnnnnnnnnnnnnnnnnnnnnnnnnnnnnnnnnnnnnnnnnnnnnnnnnnnnnnnnnnnnnnnnnnnnnnnnnnnnnnnnnnnnnnnnnnnnnnnnnnnnnnnnnnnnnnnnnnnnnnnnnnnnnnnnnnnnnnnnnnnnnnnnnnnnnnnnnnnnnnnnnnnnnnnnnnnnnnnnnnnnnnnnnnnnnnnnnnnnnnnnnnnnnnnnnnnnnnnnnnnnnnnnnnnnnnnnnnnnnnnnnnnnnnnnnnnnnnnnnnnnnnnnnnnnnnnnnnnnnnnnnnnnnnnnnnnnnnnnnnnnnnnnnnnnnnnnnnnnnacgccctccccgcgcgccggctcaggggctgccccggaatcagctccccggggccgccgcaacgaaggtggatccgcatcttgattgttctccgggagcctcctgggggctccggcggcggcgcgggcgcgacccatcccgctggcgctccccgctcgctgaaccccgtttgcctgtccacaccccctcgctccccaccatttttcctgaccggcctgtgtccccgagccctcgcggcaggcccgagcaggcgatcgcggccgggcacgcgcgccccgggctcccgccccccttccgagcatccgccgcctcttttctgctgggtctgggaggagggaggctgggaggccgctcggggcccagcgtgccagccccggagttcagcctcccgagctgcggcgcccgcagcggaggaggttttcagtggctgattgaaactcactgcaaaatcaccacgactctttcacctactgagatgattgaccgaggtttggccttccatttttactgagatttggcgagaccgaatggaagcgtccgcacagtaactgcagctgctaggccagaggggccccggcgcccttcccgcctcccctcccgcttgcttttgccttactcgatcttaccaccacccctcccccggccccccgactgagaactcgggcctctcacccgccccccagcctcccgctctgggcgagcctcctccccagcccccacccctgggatgcgaagccagcaagcttttgctgcagatggacaggtttcttttctgtggctttttcctttcgataaaccatcagatttcagtagtacatttgggaaaagaaggggctgatggcgttaaccaggttctcaatatagaactggatttctggagttgtttaccttaccccacaccccctcaacatgtagactaatgcagccattggtggtacatttattttagccacggataattgaaccagcggtttacaattgacacgtgctccgtgctggtgattttatgtggcagccctctgctgcagttccgaaacttgttggcaacgtaaacccattgataggctgatctatgtattttgaaagcctgaaaacttggcatgtcttttctgttttaatcatagatgaatcttggacattttctgtggtgaggtggaaactttaagtaaattagtaaagtaataatttggcttcagaatgggaagagatagtcaagattttttttttttaaagccatgtggcctaacttgatacaaaaataaaagtaattgtttggcaatctaaatttaaaacctgttagaactcaggacaggcgcttcaatgcgctttttaacaatatttaaggctgttttgatgagtgcgttgtgagaatcatcttaatgaattctttattgagtgtctaaaacatagtataatacacatggtattcttgccactggatagtcttcaataaaagtttaattgatttttttttgttggtctcttaagtaagtcttatttttaactaagcattgacagaatatcttaaaatggtaacctgggggtggcgggtgggtgctgtgtgcacggcagcctagccagtggggatcctgctgtttattataagtagttcacagactctgatggcattttggtaagctttccatctttaagaaattgaaccagcattctcttattaattctttaaactgtggaagtaatttccagttcttacactctgatacgcatcccttttatttaaaaaaaaaaaaaatgctaataaaaggcagtgtacttaaactgtgctttgcaaatattgtgtatgttatgaatgactacagacactgggcaaattatttgtagaatgattatcctttagctagagaaagaaatcattacaactcttttgggcagagatgtttctttttaatgttaatcaaggggaagtgatttaaatatgcataaatgtagcagtcagggtgatttagttgcttttttcatgaaagaaaaagactcaaaagacaagacttatttttctcttctgggacttgaaatcataatcatctgatattagtacagtacaagaaatttacatttgttttttacttcagaatttaagtgacttttgcccaaggaatttgagaaataaggcaaataagttgctctattttaaagtagtcattcaatataaatatattatatcaatcttaacttttttattctctgatatgattaataatatgtatattcttacttttcttctaatgggcatatgtatccttgtggacactttgagagaggttttcttggactctcccatttatagaatctttatactcttttactgtgtggttccctgcttttaacagatttctgaggcaaatatatttgtgcttttttcttatgtaggaagaccagcgaaaatagtttactgagttgtcaattttatcagtagataagaaactttctttattacagtttcagggaagattttttcaggatatttctcagttattctaagggccaaattttgtaaaatttccattaggaatgtcagtttcaaataccctttgtatagcctaagcctgtgaggataacaagaatgagccttacctatcctaacacagggatttacaagttcccaaagtaaccgtctccatgtaactcttgacatacttttctgagatttggcttatttttattattggttatttctcactgttcattctatttgatttattctacaacatccccttttatttaatgatctggaaaattctgctctttgataacaactcaggatttttttgttcagttttggtttttgccccttcctgtggagcctacattttcaaccacaataaagatgaaacaaaatttatgaaactgagctctcttccattttacttactgctggcttttttttttttttttttccttgattcctaccataccttcgtttttttcattgtacttttttaacactacctatatccattagctgcctaattagttttatctgttccatgtggatgcagtgagtttataagagaatttcacaaacaagtagttttttagtgaacttaaaataaacagaattttaaaggagacctatttttatactcaataaaagcacaaaagtgcagaaagtataaaacggcttacaaagggagacacaagctcataatgttccatgtataaaagtaataactttattgggtagagatattcttacaagatctagcacctctgccagtgcacagataggactgttttaaatgatttgggaacttttggttgcctgcagttgtgaacagagaacttctctacagagaaacaaaccactaaaagcaatatgaccgagttgagatgtggtttccaatgagcaattggtgaatttaagcaacctggatgtgcatatgtggaggctcccgtctcactgtttgatcaaacttcttttatgtagtcacgtagacttgattttttctgctgtgaaaatgaaaaaataaagcaatatgacaaaaagtttaaaaatgcataaaaaataggatttcctctaggctcctcgaagagatttttttaatatgatgcttgtcttactttcttagacacgttacatttccccttccaaaaaaaaaaaaaaggacaactggaagtaatttatcatataaagaattttgatcaaatagatattgacaaagggccctctgtcacatttttcttcatccagcttttgttcaaaaacagtatgcctcctcccttgaatcacatagggagaaacgttatactccattctcattaatttcccattttgtctacttttactcttgtacatatgttgtgggtttaagagtcttttgcatttgttctgtgacacctttttttgaattgactgttttaaaacggaggcctattttttccggtttgggactcctagtggttatggcatcccataatgcttcgtgacggccaccaggacagaaccacctgatgttttagagcagttttcagcatgacactgttaacaagtgtgtattttccaaggccacatgaaacttactttcttagccactccaggtttgggagcagaaaagctgaaaaacccttttgtgtagaagtctgagtggtttgtgggggggaccttttttagagtttgcatgccagcgcacggcctattgctgtgaaacagagagaaggtaaagctacctgaggcagtgcgctggaggatgaagtgtttgatagcactaggggggaaagaaaatgcatggcaaagtttcgtcttctcgtagactatctagcatgcagagtgtagtgtgttgaaacggtgtatgacattgctgtatcaaagttgtaaaattaagcattatttattgaaaactatgtatttttttgtaaaaacctgatcacatagagaatatcagtggcttgtgcttgtgcttcgatctaaccagcttcttgacccacccccccttggtatgcagtgttaatgctcagggttgaaaatagtacactccaatgtctcttttgcaagagtttttcacagaggattacatttgttcaaaagactctaataaaattgtgtgatcaatcttcacttgtggtttttatgtgacttttttctagttttgcatttgataactgctgtttaattctgaaaatgttgtctcaaaccagatgtcagggacaggcttgaagattcctgatgtctcagcacccagcacggctgtcagcctcggcaggaggaagaccacggaaagtgagttttctgggcaggttggagagctgctgacagtgagaatgagcatggtgattacatctcaatatattaaactggctgatagagggaataaaaccacagacaaagtgtagaggggtagattaacatgttttgtcagaaatgtctgaagtagaaaatgaaggaaaaatatcaggggcagttgctgctattgaattcaataccagcaaactccattcctcagtgtctttttttttttcctataaacaatttacagtgtaaatgtattttgacatagaaatcattctgtattgagattcttgatataaaatgcttttatgagagcctgtaagtgatccttggaattattatcagattttttaaaagatgtgtttacatggtgagtgtgtgttgcatattaaatttggttttgtagaaacgtttgtgttgtattgtaaaaaaatctcaaagtgcacaattaacacagccgctcttaggttcttggttatgtcaatttccactacagaccaaagaacaaacatcagacctatctatggcaactttttctaataattacatcatttattcaatgtcttggcctcatttcagaatatttttgaatgtctttcatcttggtaggattttatttttatttaccttttgaaggaaacaaaacatagaccctgtagaatttttatctagcaaagaagttccttgcaatgaacactaatagatcctcaatatgtgtcaaattccccattgggactccttgtactatttgctatacaatttgcctttcagtgatgtggtgtttttcttaaatagatttttttttctaaaatttaataaatttattgacacctttggttaaaatgtcactgatacaatttttaagaaaacgtaaaatgttgaaacattgatcttctcccagtaaatctaggagtgaaaggaagagttgaagggatctttccttcagtgatagcttatctatagatgtcctaaatatagtctacgctcacacaatgtcatgatccaaatacggatagtaatagccttgtcagagaatatgttggttctcctcaaaagtaaattctttcataaaatgaatagcttggtgaacttgaaaaaattgaatcctgattataacattggtcagagcacatactatttcattaaaaaggccattctttcggtgtgttgagaacatggagagtagaaagaggtcctagcagagcagctcatcatgccactttatactgagtcttttgatagcactgaattgcaaagctacacattttgtgacctaccatcagacaactgaatctaaccattaaaggcagtacatgagaaaaaagttaggagagataagattttttgaacctttaaagatttctttctgttaaataatcaccaaggtgcgtttagcctgtgtttaaataccataggtgccaatcatttctgccatccttattctgttctgaaggattttgcaaactcacatttccagctggactaaatgaccatgttccacccagtgccccttggctactaaccaaacagcagctcatggacaataggcttgctcagaacctgggactcactcactctgtcctaagatttgaactgcactaataaccagactcctcagtcccagatttgcagttaagaaacacacacacaggcctagttcttggtgagagtggagttaggaggccaagaggaactctgaagcctgaggtagccgtagccaccacaagctgaaatgaggaggttggaaatatgaggaaaacctagaaagcagagaaatcataagggagaaccacaggagccctgagaggaggaatctggggtatctgggagaggcgggctttggcagccctctgccccagctccatggggtttcctgcagcagatctgtggccaggctgctggcagactgggaggtatttggctattccttgttactaacaaaaacatatttttttgtttgagtggcaacaaagccagacaaaaaattacattccctttcctcccttgcagagagagatgaccatgtgaccaggaaaacccctctacaaggaagcatacatagtgggtatgcacctttctgcatttgtttcttccttccatttgggatgtaggtgagatggcttgagctgcaggtgtgatcttatgatcaggaaagaggaaaaagaaatttcagattccttgaccagccatgacaaacttgagccactgaatcactgccaactgctgcgttgtgtttgagtaagctacagttacttggatgtaaatgtagccaaaccaaaactctaaaaaacttctattttcctgagattatttgagtggatttgtgtttctcttcccccattgagtaaaactacaaagagtttaaatagctgaagagggaggaggatgttttaaacactgtattaatattaaaatattaatacatggggagactttagtgaaactcacaaaagttgatgaaaatattttttaaaaaagtaaagagaaaaagaaagaaatgtcaagaatttgtacaatcacaaataggacaccagatttccacttacattttatgtttattttatataaatatttcgattaagatttgtttgagaattgcttatacatttgcagagcttctcagcttggtgatgatacaagatcactctttgtcttcacatctcaagcatttcctgattccattgccagcatgtacctcttctaggtgaatagtttctcactaatctaatcctttcagat

SEQ ID NO: 285 - DNA, 1239 bp, Homo sapiens
gacgacgacgacgacgacgagctgcagctgcagatcaaacaggagccggacgaggaggacgaggaaccaccgcaccagcagctcctgcagccgccggggcagcagccgtcgcagctgctgagacgctacaacgtcgccaaagtgcccgccagccctacgctgagcagctcggcggagtcccccgagggagcgagcctctacgacgaggtgcgggccggcgcgacctcgggcgccgggggcggcagccgcctctactacagcttcaagaacatcaccaagcagcacccgccgccgctcgcgcagcccgcgctgtcgcccgcgtcctcgcgctcggtgtccacctcctcgtccagcagcagcggcagcagcagcggcagcagcggcgaggacgccgacgacctgatgttcgacctgagcttgaatttctctcaaagcgcgcacagcgccagcgagcagcagctggggggcggcgcggcggccgggaacctgtccctgtcgctggtggataaggatttggattcgttcagcgagggcagcctgggctcccacttcgagttccccgactactgcacgccggagctgagcgagatgatcgcgggggactggctggaggcgaacttctccgacctggtgttcacatattgaaaggcgcccgctgctcgctctttctctcggagggtgcagagctgggttccttgggaggaagttgtagtggtgatgatgatgatgataatgatgatgatgatggtggtgttgatggtggcggtggtagggtggaggggagagaagaagatgctgatgatattgataagatgtcgtgacgcaaagaaattggaaaacatgatgaaaattttggtggagttaaagtgaaatgagtagtttttaaacatttttcctgtcctttttttgtcccccctcccttcctttatcgtgtctcaaggtagttgcatacctagtctggagttgtgattattttcccaaaaaatgtgtttttgtaattactatttctttttcctgaaattcgtgattgcaacaaaggcagagggggcggggcgggggaggggaggtaggacccgctccggaaggcgctgtttgaagcttgtcggtctttgaagtctggaagacgtctgcagaggacccttttggcagcacaactgttactctagggagttggtggagatatttttttttcttaagagaacttaaagaactggtgatttttttttaacaaaaaaaggg

SEQ ID NO: 286 - protein, 212 aa, Homo sapiens
DDDDDDELQLQIKQEPDEEDEEPPHQQLLQPPGQQPSQLLRRYNVAKVPDTLSSSAESPEGASLYDEVRAGATSGAGGGSRLYYSFKNITKQHPPPLAQPALSPASSRSVSTSSSSSSGSSSGSSGEDADDLMFDLSLNFSQSAHSASEQQLGGGAAAGNLSLSLVDKDLDSFSEGSLGSHFEFPDYCTPELSEMIAGDWLEANFSDLVFTY

SEQ ID NO: 287 - DNA, 80275 bp, Mus musculus
  misc_feature (1)...(80275): n = A,T,C or G
ccagggtgacggacattaaacagtcctcagtcctcagaaaatgcccagcgcgtatcacagtagagaaaaatgaaacagggaaaatcagatacagaaaagaaccaacgagaactctacagtaggagccctgcactgaaggcacacatcccagaggacaggaagagcagagtcaacagctgcctccaagctagggaagacggaaggggaaggagtcacatggcacagctggaaagatctccttcttatggtaactcagaaaccagaaacacacatctttttcaaagaaactctattttgtatgtatgagtgtttttgcctgaatgtgtttctgtgtttctagtacccaaagcagccagaaaagggtatcagattccctggactcagagctacccatggttgtgagctaccacatgggtgctgtgacccaaacccaggttctctggaagagcagccagtgatctaaaactctgagccatctctccatatcccttacccactcactttagaaaatttttcaattgtattttgtcagcccctatttatacattataggtatgtgtatatgtatgtgtctgagtttgtgcatgtgagcacaaagaatgagtactagcccactagggtggctggagggggaggtcatgagtcaccactccaaataaaaattttgttactgtccaacctaacatttgtacattttcatattgtgaccatttctgacttttcctgagcaccactgtagttactattatttatatacaaagctttctctaggttttggatacagaaatggcaggttaagtaacagaaatgttcacttacacaagctctatctagaaatgactgtgccatttttaaactcctcagcagcatgcaagagtgacaacttcaccatgcctacccagcaccactatttgtcagcagctgctaatgttatctcctgtgtgaaaataacaactgggcagaggcctaccatgactaacatggccttacaaaccttttcccagtgtcaagaataatgtaattttcatgatagttgtggtctctctgtgaagtctatagagcaggcatgtttatttccatttttataataaggaaagtgaagtccagcaaagttcatccatttgttaaaggtcatacagttagtattaagccacaaactgactccagagcccctaagcatccactgcagtgtccacagaaacaaatagctttcttattgcgatgcgatcatgacctgttcttaattacacaaagtaataggagcagtgagaaatggcccaatgatcatgtccccagactgcttcttaatcacttatacagtaaaacctatgtcaccacagaaacaaagcaaactacaaaagcaactaaacagggctaaggaagatggcacagtctttaaactgcttgctgcatgatcatgaagacctgagtttgggttgcccatacccacatgaaagctagggatgatggcacaaacctatgatcctagcactagagaggtggagacagacagatctctggagctcatgaatctggccaagtcactgagctctaggtttaatgagctcagcggacaaggcactgcctggcatggcggtgcacctctaacctcagcactcaggaggcagaggcaggcagatctcttggagtttgaggccactttgatggacataattccaaaccagtcagactacagagtaagataccttactctgttacttatatacacacaaatacacacacacacacacacatacacacacacacacacaaacatacacgaagagagagagagagagaaatactgacagagggacagagaaaggaagaaaaaacaattgaagaaaaaatccaagtcaacttgtgacatacacatgcacctatgtacacacacacacacacacacacatacatataccatgcacacgcataaagaagaaacagtaaacagaatatttaaattattgtaatcaatcattatacatagttgggtaatagttacgacttagaaatatatatttaaatctaataaaattttgtttgtgtggcattaaatttttttaaatgttgcctgaaaaaaatcaagagcaagatggatatgaaactaagaataagcttcgtaattaacatgtatacatttgtcaaaaatagttacctgattatcatatttaagagactgcgtcccaaccaagaagcgaatggcatctgtttccgcagtttgaggtgttagagcacgtgcctgaggagggaggaaatgcatacacatttatgaagttaggcttaataaacacagaaaagtcggcttatctcatctgctgagatgaaggataaatcagcagtgtctagaggcgactgcacactcctaacacaattgcacttcaaatctgtacgtgaaataactctaagtgggcactaatctaagcaataaagacacaaattatttacacagagatagttaagttgtgcaataaaaccaccatgtcagcaataaatagattggttcaacaaattatacttcatcaaaacaacacaaacagaaagggcttccggcgatgcaatgcaggtagtttaagccaatttccctgcagagaactggaaaagcaatgcaaaacacagtctgcctcaaggcctcagagtgtgacaagcccaggatcgcagggcagtggtggcacacgcctttaatcccagcacttgggaggcagaggcaggtggatttttgaggccagcctggtctacagagtgagttccaggacagccagggttacacacagaaaccctgtctcaaaaaaaaaaaaaaaaaaaaaaaaaaaaaaaaagaccaggatctggctactttgtccctggaggtttaagtctgaggaaaactgtgacagggtaggaggcttaaaatgcaaacatgcacagagcggggcccaccaccaaaacactggagcagatctcacccgtggggtcacagtagtgaggagcagaattgtaacgagaagtctggtgcaccctgaaactgcatgctcgcaatccttgatccgacaaacagcccactgctcccaggctgaggaaaactgccagcagtaagtccgccacaggaagggaacatctaagctctcatgccaaaacctagccctcaatcaaatgtaagtcatctcacaggaagacaaaaccacagaggcagaagaaggaaagaaaatggaaaagggcagaaagtctgatggcccagtctctaggaaacaggttctaaccttacagtgtgtgtacctggaaaagtagaactcgggcatttgctacagaggcctgtcatccaagtggatagccttcataccatgcaccccagttgagcaactagggctacaagttgtctctggagaatggaatggcctggggcaaagtgcctctgcaggtgaagccacctccagctataggacccaactgagagctacctgccaccatcacgctcagaagctagcagcctcctgaaggtgaagtctaggaaactaaggccagcataaagtgcagcaactgtgcttagagctttcataataaaagacaagatcttaagttccacactttgagaaaacaaagactgcccaactctgactgtgcttcaagcttgtaaagtagctcagctctttcagtgcgatcattaccaggacccaggccaaggccctggaacttacaccttacttcctgctgtagggaaaatatggcccatcaaaaatgtctacatccgtgttcagacacacagtgaagggcttgtgcagcatccactcagtcaagggctggaggaggggagaatgtccaggatgttattcacccttgtgctacagtcacaaacacatggaaatacagcagagtcagggtgagctacaggggggacctcaatcaaccctccagtttcatttgctactacctgcatgtgccactgaatgcccatgatcccaggcacagaggccatgaggtcaaggccatcctgggctacataatgagaccctccctcagatattgagaaaaaagggaccagacaatctggaggtcacacagctaaaccacatattattagtttgccagaaataacagctctactatgtagagttacaagtttcccagccgacttttacagagaagttattcttcacttaaatgacagctttgcatgggtgactagagcagcaagaggtttggtgccggtctccttggcagccttgcctttaggccagatcctattatgctctgcacagaaacattggtcactgattaagtattttgtccagaactgaattacgaggcttagttgacctagacttaagtctttctcctcctacttcaaagttaaaagattcttaagcagccatgactgtgactggacactccagaccatgaaaggagggaagagaggggacaccctgtgttcctggaagatctcctcattctcagaaaagacatggatattcctccatttcttagcttctctcctcatcattccctctatggtcctcttggatgagagatgttgatttgtgagcaaagctccctccctcttttccttttatgttcttgatccttaacacatctctcagacacggggtttttagtaagatgagcctccagtaacactaatggtagcttagaaagacaggtaattgcaaggactcgggcagctgtggctggctctaaagatggaagaagtagccatgtgcccaggaatgtgggtaccactggatgctggaaaaggcacagctacaaatgctcacatggaaccaccccaaagtgacaaagaccccagtgaattggctttagtgtggggcttctcacctacggaaaggtagaagcctctaaacttctgcaatttgtcacagcagcaacagcaagcccctccctcaccaagctcaccactgtccacagcaacctgcatcctgaattcctgactgtcacagctgagctccttatatttttttacaatttatttagttattatatatatgttataatatatatttatttacttatttagtttttccttcttttttttccttgaaaatcagtaagagaaagagtttaaccattgtactgaccatttagtttgtactctttatactatttccacaattggtacaaattttagattccagaagatcaaccacactgcctctgtgtcccctcccttctccagggacagcaacacaaaactcaactgatagtgtatttaaataaaatagaagaactacgtgtccagggtgacacacactctaacatctggaaaaggtgatcgtccactcaacaggcagagcaggctaaggacgcatgtccactcctgcctccccttccgcacacttggatggacatttggacagccttaaaccagtttgtgaaatggttaatcctttgtggatctagaaatccgcacagacacatgccaaaattggggcctattagtaacacctcagaacctttgatctttatgtgccttttaaagacctagcttaggccacactgactgctgaaaggaagaaggtggtcagcaaggctagaactcaggtttaccctgctgggaagaaagcagggaatgggctccacctaagattagtacacaaagaccttcaaatgcaacttgaggtcacacaaatgatacaaggattagagtacccaaaaatagggccaggaagaggacccaactgagagcgaatgactattttacattaaaagtcttttctgcatttcaagttgatgacgacaggcggagcaggctaaggatgcatgtccactcctgcctccccttccgcacacttggatggacatttagacagccttaaaccagtttgtgaaatggttaatcctttgtggatctagaaatccgtcaagtattctttatccctgagccatctcttcaggtcttctttcttttgagataacttttggtagcatatttgagacaactttcggccagccgggtctacagaagtgagttccagaacagccaggactacacagagaaaccctgtcttgggctggagagatggctcagtggttaagagcactgannnnnnnnnnnnnnnnnnnnagttcaaatcccagcaaccacatggtggctcacaaccatctgtaatgagatctgtcaccctcttctctgatctgtctgaaaacagctacagtgtacttaagaaaccctgtcttgggttggggaaagacggtgagaggacaacaagctagctaagacatttgtcaactgaataatgaatagacccactaggaaaatatgctaccaaaagttatctcaaaagaaagaaggcctgaagagatggctcaggggtgaagaatacttgttgcacttacagagaacctaggttcaattcctagtacccaaatggtagctcacaaccatctgtggctccagtgccaaaggatctgaggagttcttctggcttctgtgagcacatgcactgcacagacagaaaagcaagcgaaaccctgatacacagaaaataaaaataaataaatctaaaaaaaagaaagaaaagaagtaagaagcctgaacagctaccaccaggaactacactgtgaccagggtggcgtgagagtagaaggccgggtaagcagcaccatgctgctctgactgctgcacagccccagtgggagctccccagtgtgatgacgctgtcctatgaagacaatcacatgctgacacgaacaagaggcttctggagacctgtcaggaaggaagctgaatctagcattggaattctgtcccggtattcaggcattacccaaaatctggggaactgtgcctgtgagtaaccataaagatgaaagtaaataacgtaataataataaataaatagcagctaagagtaacttgatgctcacggagaggctccagcacccacatcagttggctcacaaccacctgtaactccaattccaaggaatccagagccctcttctgaccttcctgggcaccaggcacacatgtggagcacatgcatgcacccagagaaaacactcacatgcacacaatgaaaataaatcttctgaaaagcacacaggcttccttcctcaggaagcagcaggctgactccggcgcaggccctgtagtgttccccgagtcctcccacacaggccctgtagtgttccctgagtcctcccagtgcttctgaagttcccactgaactggtagtacacagagcaatctgaagacagttcattaaatgtgtgtgtgtgtgtgtgtgtgtgtgtgtatgtgtgcgcgctgtcttagttaagtcaggcttgcctgtccactttaaggtttccactgactactggggctatgcatctcacttaaaaattatcacagtccatagacaggcccctctgagataaattggaacatcttccagtaacttccatttgtacttaggcttccaaaggaacgctaaaaattgactctgaacatattccacacatttcttctcattttgcaagtaaatacactgataccccagatgagtgaaacaccctcaacaagctcagtagcagtatctaggcatagcctcactctgtcctgcattgtctgaccttagccctaccatatgatacctctatgcatccatagcctcattctttatctgtatagtgggtattcagaatcacctgcagaaagctgagtttctcctcccatcagaagtgaaggacaaccccacaaagcaatcattacaaatttgtgttcaagagcacacaatgtccaaggattttatttttatggaaggatcacaaaagaaaggagtgaggacaatgaggctacactggatttgatcccatctagatgatgtcagatgtaattcccaggacaacaaagaatagacaagaatattcttgtaggaatagaggagtatagaatagtcgtcctgattcctagcatgggagttctgcgtacccaggaaggcgctgagaatggcagaagtctccagtgagctcttagcaaatcatggtccaggtctgaagaactccctgggagatggaaaccctcatcccactattgactcgaatctgtaacgagtttagtagctattgaaataaaaagttcataaggaaaaaggcaagtatatttccaacctgagtgagcaaaatgcttcataacagaccagccagccagcactcccctccccacgaagtccctctttaatgctcttgtactgagcagtatccaacacacaactcaatggtcaataattgctactcaagaccccagaagtgcgagtgtaatcaagtcacctgcgaggccgagtgctcaccctctgctgtctatgccagccctgggcctcacttggccacactccccacgcgtaccctctccccaaatccgggccttgaagcccagaatccttggaaccagactgagtgtgggcgctctctggtgagggccaggcacaggcggcacctcaccgactccgccatgctcacctggaattccagcccgtaaatcaccggggcgtcgtcttccatgatactctgcctacccagctactcacgcctcagagctcgagtcccccctcaccagggatcgctcagaacccattcattccccgcctaaaaaaatggactacgagccccagaccggctccctgaccgctcacttcctgttttcttcgtcgcgtcatcaatacgctcctccccagtggccaatggcagctgggcctttattctgcgcatgctcatttggcctttcatgagacccagcagctgcaggagatcctgggttggagggcggggcccggagcaaaggctgcgggaaaggacagccatcagggcggcgctcttattctgcgctgctccctcaagttccaaagatctgagccctaaagagaacggttaacttggcattatggttggcagagctttactcctaaaccgtggtcctgagcaacagagcactgcccaacccactgccaggaccttcgatccagcctcagaagcaggctcttagatgtccatttaaagataagatgctgcaagcttgagtcaagactgtggtgatggtgtaagtgagcagtgacatacagcgagcggtgtgcacttcacgtaaccacccagtcctgcacagagacacaactaagcccacgatctaaactgtccagagctctcagagacagaaggctctaggacctggcatggaaaatactgcaagaatgcaccataggaaatgaactgtcttggttctatgaagttctggatctccacacgcgtttcttctgtgttttgactttgccattatctcttgactgaccttcatgacagcagtttctgtgatgctaccattagcccccttagtagtcatccattgcccacctttgtcttaccttgactttctgataaaacctctggcaactagcttccaccgaccccaaagctatgaaagtcatgagatagcacctgagacctacccacctacccactgcttccgaagtgtgcttaagaagtaggtatttttggttgttactgtaaaacttcatcaaattgttatcatgtagggcagaatctacggtgacctgaatctatgttcccaagctatagtcactcacagaataaattcttcttccctttgagatgagagctgtgtttttacgttgtcatagaaatgtgacacagaaaatcaagaaagcaaggttcttgacttgaggacaattctcaaccaaccatgagttcagcaagcaaggctgactcttgactccttaattcctccccgcaactttacggatgttagcacacactgccacagacacaaggtgggaaacgtggagaatcaactagcacaaagacaaaatcctaggaaaaaacatccttggttggtgacaggcccaaggacagacgattttcttcaatctccaggaccatccttgtcccctacccagtttggccttaggccccgcccacagctcttgagccggaaatgcgcccggcttctagtggagagcttagcggctcccaaactgagcatgtgcggaagtcgagtctccgtggccagcacgcgcagacgcacaagcgcgggggaccttggatcttgagtttacttccggtcttccgtcatctcttcggacccttttcgcctgtgggtgacccgacctcaggggcgggtggcaggtgaggagcgggtcgcagtgaggagggtcgccggtaccctcgaccttcccacagagggcggcgtcctcgcgtaatcaaccgctctcggccacgcagagagtagccccacgaggggctggctccttcgggctttagccaattctgtgtgctccctgtggttttggacaaggtacacaccctcctgacctcggttttatgtgtataaagtgcgggttcgttagcatgcttagaaggtgcccgtgttacatcaccagtgttcgagctatgtttttggtttgccccaacttttgctcctgtcgacctcggtgtgtcatagccccacaataaatgaagcactgcagtaagccagagtcggggttaagagatagaggatggggtgccatagacataacctgaccactgacgaatgagtagtgttgtgtgggaaaagtgattccttcctgtaagcattcgggagattgtgatgtggaatattttaagtttgaggtcagtctgggctaaatagggagacaccccaaccccctcaaaagaaagaaagaatgaatagagtctaaaaactaaaacaagggttgacaggatggctcagtgtctgtcaccattcctgataatctgagctgcatccacaggacccacacgatggaagaagagttgttcttccacatgattgtcttctgaccataaatagacaaatgaataaatacagtaagacgaggtgttggtgctgagcctgtatctctcagcatttgagaagtagaggcaggatgttcaggagttcaaagtcgtcttaggctatataacaaatttaaggccagcttaggttacctacgaccttgatttataaaaacaaactctcacacatattaaaaagctaaataaatgttaaaaaaaaaaaagtatcagccagccagtgtgtggtgaaatcggagtgtgtgtatgctgttgcaggaaggaactgcaggtctgtgattgctcttggcagtggtggtccttttctctgagcgctcaggaggcacaggcagactgatctctgagttcgagggtagcctgatctacagagtgagttccaggacagccagggctacttggagaaactctctctttaaaaacaaataagtggtcgggcagtgttggtgcatgcctttaatcccagcaattgggagtcaaaggcaagcagttttctgagttcaaggccagcctgatctacagagagagttccaggacaggctatacagagaaaccctgtctgggggggggggggggaagagagagagagagagagatcaaagtggtccttgatacatagcaacagttaagtttactgtggctttgggtacataagacccagtctcaaaagaaaaatttgatggccatgatctagcacattgatttctgggcattgaaataggaatttgctgtaccaaagaattgaaattagagtctcaaagacgcacacacacagacacacatcctgttcacagaagcactgtgcacgattgctcgaggctagaaggaacccaagcatccatttgacaggtaaatggatgcgctaactggcgcacgcctgcagtgctgtgttgttactcacctgtccaagggaaggaaagcccattggtgctgcggcatgggtgtcctgccgtgaggaatggactgtggtggctgtgcgttccagttcagaggacttggcgctcaggaagcaaagagggcaaatagcacagagcaggctggggcagccggtagacagcaacacctcatgcagtcagggcttacaatagccaacagagaagactaccgtagcctgacagaaagaggggccaaaaggcatcatcaagtcagtgctcccagcatgccccagagtctgctggggaagcggcttcatactggattcctgagtggagggtctgggcagagcagagcagtgtccacggatgagcttcacactggtgccaatggttaccttctagctgttcacaagcgcttcttttcacgctcaagatgtgttgctattgttagcacccagacaaggcccttggacggaggacactatgagatagacatggttgagcctgatgtgggggcagggacgatcccaccttcacggtaagggcagacagcacttgtttactgatacactgtatattgcaatgggccaaggatgtcatgatgaatgccttatgattctactcacttgaggtccccaggaaatataaaagatgggaaataggatggtggtcatctgttttattaaatgggtatagaactcctgtttttgcaagatgacaaaaattctggaggttaattggacaataatgagaatgtactaaacattactgaactgtatactttaaaaaatggtagctaagctgggcagtggtgatgcatgcttttaatcctagcacttgggaggcagaggcaggcagatttctgagttcgaggccagcctggcctacagagtgagttccaggacagccagagctacacagagaaaccctgtctcaaaaaaccaaaaaaaaagaaaaaaagaaaaagggctagcaagttttatgtgtattttatcctaattaaaattaagtaaactagaaaaagaaaaacttttaatttgtgccccttggatgtggaactattaaacatgtgttccactgagcgataagataaaagtagtacagcctatgtctcagaaccgcagaggttgtgagttcaagtccacgcacgttatgtgaaatcctctctcagaaaagaaaacaagtttatttacccatacttgaaataaaacagtggagtgattcacgactgcctctatttttagacaacatggaaacagctaaagatggtgagcagagcccaagtgaggcatctccttcagcccaggcaggtcctgaaaacatcccggagcctatgtctcgggaggaggagagccagccattgtaccatgaagagaccattgatcttggtggagatgagtttgcatctgaagagaacgagcccacatcggaagggtctcacaacttcggagataagcttaatgagcacatgatggaaagtgtgctcatctccgactctcctaacaacagcgagggggacgttggcgacctcggctgtctacaggatgttggggagccccccagaggtgccactgatcaccgactgcccagtagcacagacaaagaagtggtggacactctgagtaatggcagtgaaaccgatggagacgacactcccagagacatctcagacatgacacctgatagcagagcctctctgaaggaagactcaacacaggaagatgtgacgagcatgcctgcactggagaatgctgccacggaggaagtcgggcctaaggacagcctcgcgccccgagaagagcagacctcagaagtgtcctccaatcagtcctcctccaaagacgagcccttgcccgtctgcaccatcttcagccaggctaccgccactccctcccagccacacctgtttctacaggatggcttcgagtcccagatggtgaaatcacccagtttcagtagcaccagtgagatgtcagccaagacccctcctccgatggtccagcccagtcccagcctcagtacattttttggagatacaatgagctctaattccttggcctctgacttctttgattccttcacaacttctactttcatttcagtcagtaatcccaatgcaggttccccagttccagaaaagctgtcttcactcactgcccctgtaggagagaagtccccggattccaccagcccatcttactccacaaggatggatagatcggaatcaggtgtttctcgggcccctctggatgtccctgaatctccaaagccattttcacagatccaggctgtgtttgctggaagtgatgaccccttcgccacagccctgagcatgagcgagatggaccggaggaatgacgcatggcttcccagtcaggcgaccagagaagtcctgatgtcagtagcaacccagcagtatggcactgtgttcatagacaaggagaacctcactatgcctggcctcaagtttgacaacattcaggtaggatgaggactgtttttatgtccatatctcactgcgtgtaatctccttctagatctgtgtacaacagagaggcttgtagtaactctggctttcctagttactgggctcgacagcacctatacctgaagccgcctaagcagcacgtactgagtgtgcttcttaggcttgtgggtcttgcctacttcttacttcttgtagcagcaagctgactgagttcgaggccagcctggtctacagaatgggttccagaacagccatggcactccccgttgtgtgccccaccccacaaatgcattctagagctggaacgataactcagtagttaagagcaccggctactcttcggaggagctgggttcaattcccagaactctcgtggtggtttacaactctctgtatctccagttctgggggatttgacacccttttttggcctcctcaggcacacatggtgcacagacacacatgcaggcaaaacactcataaaggaaaataatatttcaaaaaaataaataataaaaggatgtattctagggctggagagagaacttggtgcttgctgctcttccagagtactacagtttggtttccagtactgacattaggcagctcacagctgcatataactccagctccaaaggagccagtacactcttgtggcttctgaaggctttgtactcaggtatacatagccccagatagacaaacacacacacacacacaccactaaaaataagtctttatgaaagagtgcatttcaatagtattagctgagagtcagcagattaggtcagacccagagcaggataatggatgactgaataaactgaagagtccagatgtggatctgtaactgcaatcaagcagttctaatcagtcgttagtcttgcagtgccttcagtgtagatgtggcttgcttctatgaagttctgtgtacaagatgccaatcagatgttctccctctgacactgttgtaggtagagtgtcctttgttctaaatcagctccataaatacttacatggaggtttgttttccaagtggcttatctaattaaaggtctcatttttatgagataattttttttcacttatttattcaacaactctggtggcaatcaaattaagttagacaagccttagagttatgattggaaagctgtattcagctctagttgcatcccgcaaggacatgcacatttctatccaagtgttttgttttgctggatggtgtcttagttatggttgctattgctgtgaaaaaaaaaaacaaaacaaaaaacaaataaataaataaataaatacaccaaaaacacaaacaaacaaaaacatgaccaaaagcaacggggggaggaaagggtttatttcagtcacggttccatatagcattcatcgtcaaaagcagtcagggcaggaactcaagcagggcccgaacctggaggcaggagctgatgcagaggccagggaggagtgcttctttctggcttgtccccatggcttgctgaggctgctttctaagaaagcccaggatcaccagcctaggaatggcaccgtccacaatgttctgggctctctactgtctatcactaattaaggaaatgccctgcaggtttctctgcagccccatcttatggaagctttttttttttttaaactcaggttccttctgctagactgtgtcaagttcacataaagctagcccacatagatagcattcattcctcttcatcttgggtagcaggcatacagtctcatagattttcactgtgacatttccatacacagatagcatgtcctttgctcgtattctccttctgtcacattcctttgtcctctctgtcactcgacagcttctttcctccagagtgtattctgcttgccatggcgtgtgcgtgcgtgcgtgcgtgcgtgtgtgtgtgtgtttaatctaagttcaatatatcaaaagaaaacctaagatatttgtctttctcttttcccttttattgtacactcttgcttcccaccttgggtccttccctcccgcaatgtgaacttgctgtgtaaatcaggctaacatcaaactcttaatcctcctaagtatgtggtcaatcctgagccagcacagccacctcacagtagttcttctttcgcagaatcttttaagaatttcctataatgtctgtacccgctgacgttgtcagggctctccctgtggttctgctctgtcttaatgttgagctgtgtgtatccaccataaagatgacaaatgtgtctcagatctatgtctgagctgaagagctagaagttgcctctaatcatctggaaaatggaaatcacagaaaatgtcacctcattcctgttaggatggctgttaacaaaaagacgggtgatagcagtaatcacagtgaatgtaaattagtaagccattatggaaagcagcatggaggtgctttgagatattaaaactggaattaaccacatgatccaactgaaaccaagtcagtatcttagaaaaagcggaacgctcatgatagagccacacagccagcctgagtatccatcttgggtgcagagataaagagaatgtggttgacttcctttgagggtaaagctggaagggcatagctcgattacatggtagttttgttcttgtgtttgcttttgaaacagttttgctacatttggtacatgcagctgatggctaatctgtcttggaaggatgtaatagtaaatgaataactcaagcaaagaaacacagacaccacatattctttcttatagaatcaggaaaaaaaaaacccacaaacaaacaacaataacaaaaaacctgaactcatatccgagagtacagtagaaatttgtgggaaccacatttgaggtatgctgggtgagtgggatctaatatgcagtatgatgacccagttagagtattctgtagttaacttagaatttatgagaacaagttttaaatcacacacacacacacacacacacacacacacacactgcagctatgggtagtggtggtatttgattaatttgtgttattcagtacaccctatataaatattgaatcagcatgttggactctctgaatacacagttttttgtgtcagttaaatatctttttgaggacagataaagccaggcatagttagtgcacgcctatatccctgtatttgcgaagtggaggcaagaggatcaggagttgagcattaacctaagtaccaaggtaaagtcacactaggcctgcgccttacatcaacttgacaggagctgttgtcatctgaaaggagggaaccccaattgagaggatgcctccatgagatcttgctgtagaacatttcttaatagtgattgagggtaccatccctgggctggtagtcctgggctgagcaagccaaggagagcaaaccagtaagcagccctctgccatggcttctgcatcagcctctgcctccaggtttctgccctgtttgagttcctgtcctgtcttccttcagtggtgaacagtgatatgggagagtaagccaaacaaaccctctcctccccaggttgcttttggtcatggtgtttcatcacagcgatagtaaccctaagacattgggctatatgagaccttgcttcaaaaaagccataacataacatatatacatacatacatacatacaatgttctattcttacccacattcctttttaaagtagagttaaagagctggagaagtgactctgtggttaaaagtgctttttgagcttgccaagggcccaagttttgttcctagcacccaggtcaggcagctcacaacctcttgtaactccagctccaggacgtgatgccctcctctggcttctgcaggcactgcacatgtggctttcacacacagagaggaggaggaataaaacaaagctagaaatcaaataagcaaacagattaattttatcatctggtaaaaaatgatctgggacacacaaaatttctttgaggatctcagaaactacctggtgctgatgcatgtgtattggacaaaccttgcattgaaggggctgcttcagggacttgcatacgtgacccagagatatccatggaacggtaaaactttagtgaaccaaaagttgaaatttccgttgagctgcactaacccagtggcaacctaagtgacagtggctggattggataggagtttgtatccatatagtggaaagtcagctgaaggtgaccagggctgtgtatccatctgtcaggactccccaccatcagggcgaggaaaggtagggcacatgagcatcccttcaacaggtgtatcactgaacaacgaagtgtgcgtacccttcccagtgtcccttgacacaggactcagccacttgaccacagcagcctgcagatcagggttagttaggcaaaagtaaggtattgtatccctagaaggtgaaaatagagacttatggataatgaagccacttctgccatgacttccctgacacaaaaaagtctcagcttttcacatcagtagcagctgttgttgctaaactactgcatgctatggctgcaccagtcaagtatgtccagcatgcaaatacatgtacccggggcagcacatgcagatgtccagcatagcataaagtacgttccagaactaccctgtgttgaattgttagaagctgaaggaagggttcagaccaaggaagctaatcatgcagccaatgttgtgtgtccgtgtgtatgtgtgtcatacacactcacattcctattagtaatttagcaaaataacaatggtacaggtgaggtgttttgagtgcagctaactctggcatgagggaagctgaagcagaggactgggagttcacggccagacactgtgctgagtcctgtgtgtggattatgccactgtttcccttagcttgtctatggaaatgtgggtgtaactcagtaataaagtagcggagcaggcttccaaaatggacatgtcagtttacattgtgtccagcactctgtgtttcttctagtaaatttggggacgtgttgttgttgctgctgttgttttacttgctattgccttggaaatggagtctgcattctttagtcactttcaatatcaaacaccttttgctatatatgctactttttaaatcttttttttccttatgtttatttacttatctgttgggaatagacacatatggaaatcagtagacagcttgcagaaggcaattctctgcatgtggctccagggaccaaatccagatcttcaggcttggcaccttcttcacccactgagccatcctgccagccctcagaaaacaatttatgaagttgtctgtttgaatgttttctttgtctttaagctttgaatgtctctcttcctattactgcctaactttaaaagctctttaaactcagttaatggaaatgagtaatatctatagcaaatattttccctattctgggccttgctagtacatagtcttttttttatatttttttaagatttatttatttattatgtataggtacactgtagctgtcttcagacacaccagatctcattacagatggttgtgagccaccatgtggttgctgggatttgaactcaggaccttcagaagagcagtcagtgctcttatccactgagccatctcgccagcccaatacatagtcttatggtgtctattgaagacaaaaccatcattttttttttatcacaggcctattagtccatctattctcctagctgttgtcagtttgagaacttattacaccttcctttcttaaggcacggggacaccttgtcttctgtagctcctgtgtgcttcctcccaggatgctttaatatttgaccactgtggggtggaaagatggcttggtttggtagttaagagcacttgatatttttctgaggactcagattcaattcccagcacctacatggcagttcacagccacccataactccagttccaagggatctgacaccgccctctgacctcttcaggtttcagccatacacatgcaggcagaaccctagaacatatcaaataaatacatctaaaaaggagaaaatttaaagatttattcagtcctgggactgggctagagacatagttgtgcaatcaagatcttgcttgctgcttttccagaggacccaagttcagatcccagcactctgacctttaagaactactcactccctcaggagaaggctgtggtatcctcaaggccttccctccatgaccgcatcctaggctagagcaggtctgtgattacagtgacaacccagcccagtgcagcagcacagctgcctctcctcgttctagtgagtgagtgagtgagtgagtaagtgtgtgagtgagtgagtgtgtgagtaagtgagtgagtgtatgagtgagtgtgtgaatgtgtgtgtgagtgagtgagtgagtgtgtgagtgagtgtgtgtgtgtgaagaaggtaaagtagaaccccgtcatctttcttgccatcttcaccttcagtttagaaacacagcagacacaagatgtgtcataggatgtgggtgattgctttgggctgtcttaaatgagacattgattagtcaaccatacctctctacccaaagagtgtgctgtcataactaatccttgttaaatgtttacattatttattagtttgtgcagtgtgtgtgtatgtgtgtgtgtacatgtgcacgtgtgtgactgagtgtgtgtgtgtgtgtgtgtgtgtgtgtgtccacgtgttctgcagtgcatacgtggaggacagagatagcttgagagatggagttggttttcccctccacctttgcctggattcccaggactgagttccggttcccaggcttgtgtggtgcgagggaagcactgtcacctgctgagccatctttacagaagctgaactttaaggaaaagaactttaaggataaaatatatttatggtgtgatctcattagtagagactgtcacttggatgcaggagattcagatttgcgtttgctttttgctcagctctctgcctccacaactctagaaattctctgcatttggcacaagcaggacttttgtagttcatgggatcccacattttcacccatttttatttgctttgtaaacattgcttctagagcactcagctgctcccgtggctgtgataattggagtattttaaccttattctccaaaagcagaaattacaaatttgctgctactaaatatttgcccccgtatagtagcatacttggcctctttaagcaccaggctcaaccaccacagagcctgaaacagcacagagcccagatggcctcctgctgaggtaggcagcctacctctctaggtggctaaagaacagacagtgtccacaggactagaggcaccatctccagcaagcaggtttgggatctcccgcagcctgtgcagcacagtgctctctctgcactgtcacaacttcttggtgtgagcagagtgaatgcttgtcgtcatttgtcactgacttggtttatcaaccacctcattcatgtagccttagagaatcaggagcttgtgacctcatcatttgtcatgccctatgcttcatgtccattatattgctcccatcactccaggcccttaggacctttctccccacggctcacatgggcctttcctcctcccctgctcgcctgtgacttcccttttaaaggaagtataatggctgaagtaacacttaatgtcttccatcttgcttctagatgggcatagcaaaaagaataaagttaggaggcaaaaagtggcccagagcagagacagttttaaagtacatcctccaactccagcaggcccagaaccctgggtacaagacagtgacaagagtcctgatcatattgggcttggctagtgaaggagccaccagcatgctggtggaggtaatgtcacacacacggcatcccaggaagcttgaggagctggagcgacacaagcctgtttggtctcccacatggatgggggctctctcctgtgctgaaagtctctgtccttgacaggctgtaggctctacagaaaacctgatgtggtggtgatatactgctttcttctcaaaataaagattagttgtaaaactaggaatcttctagaagttatggcttagcttctgactgattgcagttttcttgtgcaaagctgtaaacatttcattatctctgcctctctctcccacattctttccagggagatgcagttaaagacttgatgcttcgcttcctgggtgagaaggctgcagcaaagagacaggtcttaaatgccagctcagtggagcagtcctttgtggggctgaagcagctcattgtaagtaaccacacactgatttcagcatgtctttgataagcccggcttccttctaggtccttccctggaagttaattgctctgaatacagcgcaagaagctgctgcagagcaagccttgttctgtttgatgccagtcctgggaagcaggagcactgcgccagctgctgaccatccgaagttcagttggttactgtgaacaatcagagggctgcaggcagccaggtagcagactcccatttctagaacaaatacagacagtttgtgtgtttgtttgttcatttgtattttttgagatagtctcaccgtgtcacctagactggcctcattttcacaggctcaagggaccctcctcaccctcttcttgccttgatggtcatttcaaatgtcctccatttagtctaggcttactgtttaactggagaattcctgaacactttcaaatttcaaacgggtctctctaatctgctagttctgcatcatcagcactacactggctgacgttgttccagtgatttttagggttgtgggagaacttcagcagtgtaaccagtttcctctggattattagggaaagccctagaagttgatcatacatgtctcctgtaggaatcctcgggcagaattccttctgataaaggaatgctcgcaattggtagccttacaccccatggtgtccacgtctgagcacggtcagtgggcatgccttgtggaagggatctgggaagccatgttgggctaaagcaaagggaggtccaaccgttccctgactgctcagtcactctcctgactgtgatgagcagacagggattcactgggttttctgcttataccactcatttttttcaggagttgagtcttgggtttgggtttattttgcttgtttttgtttttcccctgtcataactagttttttgtttcaagcaagttttaggacctaaaggtatactatttgagtaggtctgaaagatataccatttgaggcttacactttttattaaggattaactgcagatcatctaaataaggtaaaggaagcaggtgagaaggcgcagagggtaaaggccagggacctgagtttaatccccaagtctgacaaggaggaaagagagaaaattatcctctgacttgcacgtgcatccacgcacacacataaacacacaaaatacctaaagaaaatgaaatataaaaagtttttatgtcaggtgaaggttagcatatgaactaaaaacaaaaaagctttctgagtttatgttggagacacccattgtggagtgtcagctggccaggctggggttacacctttcacatcaggtaagaaagccttagctgcttgagcagttgacggtgcagtgcagagtgagataagccccagtctcagactggcatcaggtccacattcaacgcagatgtgaaaggcaagtaaacctcacatgtccttacctggcagaggtgacaagagtttgagaggtgccctgagtcacaactcagggatagtagatgtctaatcttaacagagccgtgtgtggattttctccttcattgacaggttgtcttgaatccagatgcccaagccacatgaaggatcttttttcattttaaaaaaaaatgtattatttataaaatgtaagtttgcatgtatgtatgggtgttttgcctgcatgcatgtctgtgtatcatgtgtgttcacagtccctccacagagtagagaccacatcctgtaacctgggactgaagtagttgttagctaccatgtgagtgctgggattcaaacccaggtgttctagaagagcaaccattgctcttaacttccgaaccatctctccagcccctacataataatatttttgacatctgtcttccatggtttagaaggagtcaggctgtctctgtaactgagccacaactagcaatgtaaaccttgttccagagcatagacaataaggcctttcagacagctatgccaagacatcctctgtggtggcatcagccaggacttccactcttggtgcctgattcccaccccgctgcctctgcagcagtttatatcccggtgtcttcttagctgcacatatgacacctgtgccctacaatgcccaaaggaaaaataactaaaatttgctcctgtcacccaaaggtttgcttcctagcctttggtgtattttttatcttccttttatctctgctcgtttgcccagaaaacctttttgatcttactcatgcacacaccccaaaaaaaaaaaaaaaaaaaaaaaaagccagtgttttgacaatacactgagcctttctgagccctctgtccccagacaatagtgacttcagtgtcagtgggcaagtctgtcttcaggtgcagcaaaaccatgaaaaccagtaagcaccctgacagtcaggaaacggctatttcattgacagaatctgcacacagatggtgtatagagaactatagagaattggctctgggaaggaagctgaaacagtagagtcagaatactggttcgaaaaaaatggaagaaggactaataagatgaatcagtgggtaaagactcattgctacatttgataatgtgaatttgattccccatatggtggaagaagagaaccagtttctttttttttttttttttttttttttccagttttttgagacaaggtttctctgtgtagccctggctgtcctggaactcactttgtagaccaggctggcctcgaactcagaaatccgcctgcctctgcctcccaagtgctgggattaaaggtgtgtgccaccatgcccggtgagaaccaatttctatgttggcttcaacatccagatatgtacatgacattcacacccacccacatacatatatacatacatatatgcataataaataaataaataaatagtatgttttggaaagagaaatgaagaataagccaggcaaagtggtcacatgcctccagtatataggacatcactagtttgagatgagggtggcctgtgtagcagacagagagagagagactgaaactgaaactgactgactgactactgactttagttactcttctattgctatgataaaactcctttatagaaggagactatgtgtggggcttgctgatcctgaggggtaagacttgataatggtagaatggggtagtcagtggcagacagctggagcaaggactttgagaaggaagcagagcacactgagaatgccatgggtgtttgaaacatcaaagtcctgctcagtaacactcctgtttaagtaaggccacacctcctaatccttcccaaacagttccacaaaccaaggcccaaacattcaaatgtatgagcctatgagcctattctcatgcagaccaccacagattggtgtgaagctcacatagaaggacagatgatgcgtatgcccctgctgcctccagaccctgagcatgaccagaggggcctcaagaggatatggccatggaaggcagcaggccagcctagggcagagcacttccaccatgaccattctctgtgtggaaggctcacttttgtatcttttgtgctaataaaaagaggggaagtgtatgagcttttcattaaaaacaaaacaacaacaaaaaaaaaaaaactagaaaactgaggccaggcagatgttgtggtgcacattcacagtgccagcactgaagaggtggaggcaagaagatcagagttcaagatcatcctgagctacacagtgagttcaaggccaacctaggcaacaggagaccctgtctcaaaagctgttttaggacttgggagggttatttttgtttttaaaaactgactgcttcctaatcagcaaaataagggaggtgccgcagaccctctggatccctttgtctgcgtggaacgggtctctggggcaggtgggcaaagcgtcggatggaatgacagacagatgcacacaggagaggttgtgtagaatctgaatgtaatttgtcaagtcgagcatcaaactttttatactttatacagaagaaaatagggaagttgggtgacacacccacaaggtacaaagaggttactggattcttacataaaacagaggaatgcaaacacagaaggtctaacaggaaccacctgggatagaattcaacaactgggatcaacaagagctccacctaagattcacttaatcttagaagccagggtcaagggctttgtgcccttgccatagttcctattttagtctattgtatagtccacctttcccctaggccattgtaaatatgtgtgtatggatgcaacttagctatctatagttctaagtatctattctggttcctctttaggtctcaaacttccttcttaagacatagtcttttgttttgttttgtttttttttgttttgtttttcgagacagggtttctctgtataaccctggctgtcctggaactcactttgtagaccaggctggcctcgaactcagagatccacctgcctctgcctcccgagtgctgggattaaaggcgtgcgccaccacacccagcttcaaacttccttcttcctagatgatggtaaattcctgtgtagggcagtgacttagcttttattcaaagtgatagtgtaataccagaggcaattctgaatgtcactgaataggcaacattcttactgaattccaagcccatggtctgctcaaggactttctgttggaacactggcaaaggctttagctatgtcagaatttaattttaaaaggcacttataataagataatactaaaagagagcacgtggatccatacaccagactaactcgggaatggaatattaatgtatgggttagagagaatgccagcctccaggaggtgagtttccgtgaaacgctttgcctcgtgagtggcttttaggcctctctgcttgtcaagctgactcggagtgcatggcagggagggagacctctaacacaaaggacaaagtcaccctacttcccttttttcactttgatgaactgtaattcaaaaccatgacactaaataaacctttcccccaaagtagggaggagcatgtttgggggaacttttcccacccaaaagtccacactttgcagattagaagacaggaaccgggctggagagatggctcagtggttaagaacactgactcctcttccgaaggtcctgagttcaaatctcagcaaccacatggtggctcataaccaaccgttatgagatctaaagccctcttctggtgtgtctgaagacagctacagtgtacttacataaaaatcataaataaatctttaaaaagaagaaaaagaagaagacaagagcctaaggcaatgtcctaagtgtcccagtattgactaggtactgcacagcccctgaaaaccatgctttctgtggacatatgtcatttcctgccacaggacatagtatttctgaaccactgactatgtgcactggggtactttacagagtaatgactagaactgggctatatccagcagtgagatgtgtgtctgtctttctgtgtgtctatgtatctgtctttctttgtgtctgtatgcatatcaatttgtctgtgtatatatctgtttgtatgtctgtgtatgtatttgtgtgtccctgcatgtgtatctgtgtgtctgtgtctgatggacttgaaacaaattccatattaggttttccagtttatatgtgtttattcagcaaacacatatcaggcttttctggctggccctcactctctgaaggtctactttcacagtcacttgtaaagtggactctgatttagagatgtgatactgttttttaaaaacttcacatcctagactcactggcctgaggggctcttcatcagcatcttcagccctgagagacaacccagctttcctgaccctggtaatgaatattggcttgtttcttctctctcctcactgtgccttcacacatagctgcttgttcagagctggatagcagttccctgagtccagtcaccatgaggaatcccttgggtcttttgtgcccagggaagagtcccagctattccccttgaaaggactgagggatccttccagagtctgagaggccaaaccgtccatccctccccctctctgcagttgttctagaacaattgtgtggtcaccagaaacaagcacacaggtcttcactccatgacctggaagagtactggacccagtggagaccttgtcccgtaacagaagcaggcagctgtcaccgaggcaggcatttatcagcccaaccctgagtcaccaacaccagtgtgcccccagacctactattcgactcggcgtctttcactacactactgatgtgttctcagaaaggtcagtgactcacgtgctgaggtgtgttatatacagaacaattaggtttaattttcagtaaatgtcaatctactgtcccattggttctcttactgaagtgactctgaggttactcctgtgattgaaagctttctgtagctctgtgtgtcagcagcttcctgtgatcccagcagtctcgggctgaggtgagaggattatgagtttgagaccagtctgcagtatgcagcaagatttttaagaaaataagactttgttggacaaaaaaagcaagatactggttttaaaaaaaagcaaggacagctgctttaagtgactgcttttctgtccttgctagtgagattgtaggtgaccatctctgcagcccccgtgagctggtcagcaagcaggcctttccatggtaaggggtggctgttccccttcttcaatttggactttaaaaagaaaaccaaaaaagcaagcctgacttgatgatggacaggcttcatttcccagttcatctctaaagtacacacgggccctgtactgattataatccatctgcctggtgtgtttctaccatctgtagttattccttatattaatacatgcttttatctttctcccatacactgaaaatgctcaaggccattggagatcccactgcaggaacctgaccaggcatcctcttcaggacgggtgtgtgtatagaaaggccatggtgttcattgcggcctaagattccctgccatcacatcctcagtgtcctaagtcacatcgccagtgctctaagcctgtaatgtacggagaagcaaatgtcactgcccggagagaaggccgttttactcactcgcatggtgttgtgtgcagagtgaatgctgttgagtcgtgtgggcgagctgtgcacctactctaatcactcagatacttcacgccgggccatttgtcctaacactggaagtcagagtgcctgggctccgttttcagagtcttgtcttatttcctacttcttaaaaagtaataccaatttaaatttagaaatttttctccttccaaactaaggtcgccagagcgctgcgtggcctatccagtagagatagactttctataagatataagagttcttggggggctggtgagatggctcagtgggtaagagcacccgactgctcttctgaaggtccagagttcaaatcccagcaaccacatggtggctcacaaccatccctaacaagatctgactccctcttctggnnnnnnnnnnnnnnnnnnnntcctaagtcacatcgccagtgctctaagcctgtaatgtatggagaagcaaagtcactgcccggagagaaggccattttactcactcgcatggtgttgtgtgcagagtgaatgctgttgagtcgtgtgggcgagctgtgcacctactctaatcactcggatacttcacgccgttccatttgtcctaacactggaagtcagagtgcctgggctcagttttcagagtcttgtcttatttcctacttcttaaaaagtaatacctatttaaatttagaaatttttctccttccaaactaaggtcgtcagagcgctgcatggcctatccagtagagatagactttctataagatataagagttcttggagcctaatgtattatgtggcatacttcaaattctaattttaaaaaatatttctttttttttaaagatttattcatttattatatgtaagtacactgtagctgccctcagacactccagaagagggagtcagatctcgttatggatggttgtaagccaccatgtggttgctggggatttgaactcctgaccttcggaagagcagtcgggtgctcttacccactgagccatctcaccagcccaaaaaatatttctttaccagacatttccaatatctaacattgaaaacaaaatggaaataagaaggtagaaaatgttgagaatagcaaaaaaaacccactaagaaaataattaccatttcaaatagcaaaaggtaggggagtgctcacgagaagcagtgctggcagggagggtagctcagtggtggagtgattgcccagtgtgtatggggtcagttccagcaccaccaacaccacccaaaacctgaaccctgaaggaaaacattgaaaaagactgaataaatccaaaacgttgaatatacagaaatgacagaagacctgcattcaagatataaaaagaacttctcagactaagatgaagaaataggctggtaaggagagagataaaaggcatgaagaggctccaggaagtcaggtagcaaggaaatatggaagtgctcatctccagcagaggtcacagaggcataaacagaacaggagcatcctgagcccggcagcttagcagagctcagcagcacagcctgtagctggaacaaggagtccataaagctgccccagaacagactgagagcagctactgacatggttgtcttagttaggtgtctactgctgtggtgaaacttcatgaccaaaagcagcttgaggaagaaagggttgatttggcttaaacatcctgggttccagtccactgggttcaagcaggaacctggaggcaggagctgatgcagcggccacggggaagtgctgcttactggcttgctccccatggcttgctcagcctgctttcttataggtcccaggaccatcagccaagaggtggcactgcacctactttgagctcggttcacccacatcaaccatcaatcaagaaaatgcactacaggtctccccactggccagttgtaaggcaaggaacgttttctcaattaaggttgcctctttctaaatggctatagtatgtatcaagttgacataaaaatcagctttcacatggatgttttataaccattcaccctgcttctagtattaggctttggaaaacaacttggaagaccaggtgtggtggctcacacctgctaccccagcagggaattggcagatggaagcagaaggatgcaaagttctaggccagcctcagctgtgtaccaaggctaagggcctgtcttagagatccagaatacactcagaagttcccgcaaaaaggatagggtcatagcttagtgcagagcactggcttagcatgcacaaagctctgagcttgtcttcaacaccacagaaaaaagagcaaaggcctaagggattataattgacaataaacaggatttcacaaaaggcaaggcaaaaagaaaagagcacctaaaaacccagccctccaggtggaagcaggagggttgcttctaggcctgaccacactcaagaatatctcaaaacaaacaaatcagcaaacagtaaaaacctccttgtgcaggtatagaaagatatgccaaaaatatttctacaaccaggtatagtggggaacgtcttcagtctcagtactggggaggcagagggaggcacaggtctctgtatctacagtcagcctggtttgcaaatcaagttctaggacagccacggctaaaaaactacaagagttgacagctgatgggtcagtgagtaagagtgcgtaatgtataagcatgcagcccaggttcaaatccccagcacccacataaaaggcaggcatagttgcatatccctataattgtagcacttagtaagaaccagatgggccagccagcaaaaccaaagaaacaaggtcctagtacagtgagagatgctctctccagggaataaagcagagagcgatagaggaagacatgcagctttctcctctggcctctacatacatgcacaaaggcatgtgcacctacatgcaggcacacacaaaagtgcatttgttacatatttgtaacaacaaagaaaatcatgttatatacagtcaattaaacactctggagcaattgaaataaatgagccacagccacattcatcaatacagataagtttgaaagcaatattgaacaataaaagcaaattacacaagcttgcctagagggtttatattcatatgtgacaacatgacacctcagccatggttgggaaagtcaggcaaactgtaagctttttctgttggaaatctactcagctcacttagcacctgccatgtgctcccagcaccttttgcaagttgtcccctgtgttaacaggtcttgagagatcttgtcccttgctactttttggctcttccacacccatgggacatccctctctcactcagcagtgactcctctgtcctggctggctcccaaaggatctaatggcagattagtgagaagatatgaccatagtcatacttaggtcccttggtgacaagatattcctgggcctgacagtgtctggaacacaaagtaaacttgagccaaatgagtattctatattctctcatcagtaaataaagactgggggaggcagagaattgaagctgggagctagatctactaacgtgtggtgtatggtttcctcactcagctcttggtgactttctgtttaaatagcagtctgagggaaacatcccttcctgtttccctcgtgcctggttgacccaggctaaacatccaaatcacaactagtgattggtcctaagttaccaggagccctttctgcctgcaagttccaaatctaaccctggaccttgactctctaccacaagttcatgttcccaaatgccttacagcccctgagactcctgaggaatgaaggtggcagggctgtcaggctgctgccctgggctgttgtgtgttaaggtgaggaggaagtggaaccttgtgactcactgggtttggctgtcgtgttaatgtaagctttttcagatttaaatgcatgacgtgtgtagtctagttgtagcagttgtctctagtcagcttctgtcgggaccttacgctgggaggggctggcaacaaggtaatgcttctgcagtccgctcatccagggaagaagctacttccagaaaatttatatttacttaaaagataaataattaagatgctgggttgttttccatttttattagcaggtctagtttgagagagaggggaaacaactcagtgtatggaatcacagtgggctccatggggtttttaagacatttcactatttttaatcatttagggaggactgcctatctgtaaattccttacaaataattgtattgcacatttaagtgttttacttatggtggatatccatacagagtggctataaaatgagatagaagcctttactgcataagaattgtttttaaaatatgtgaacagatttttctcatgtacctatttttgcctacacacaaattctaattgactttctaatgtgttaaacagaaaccaacatacaatgtggcataataaaacttagcatgaggaaattcagtatctgctacagtcatcccttggtatccctcagagatggttttcaggaaccccagggaggtaccaaaactgagggagttcagatcccatgcataccttgcatagtgtctgtgtgtttcttacacagtccccagtgcagttgtccccactgcattccttctaactccgacgcctcaactgtgtgtgtgcaggtgtaggctgtgtgggggaagtcccgcatgaaaccagcccacaagtggtttcctaacactatccattggttagatttgcccctgcagattgtgtgggtacagagggctgccagtctaaatccttaaacttttcaacacactcccccacctgaactctgctggcacgagcctaccatggccagtacatggtagctacatgtgaaatggtggtaagaaaatggggcagcattgaaagaatccatttggaggctgcttgttgaccaggtccagttgccctcgtcctgggtgatgttggagctttcactggaactcagtgactttgctgccacaccgccaccacctcctcccttcggttttcctgtcattctgctctccttcccctccactcctcgtgctaaaccagtgtgaaccagtctgggtctccaccaacaacctcgtagttcagccttctctcccagagtacaaggaaggctgtggtggcctgcttgagccatgacacagtggattggctatcatgcccttttcacggagctggtccttctcctctgcttcctgcagcttcctcagtcttgcttggttctccagcaggtaccacagtccttccagcctgtgagtggtggtcatggtggggtcagttggagtagcaagctgagcaggtcaggcatggaagtgtgctgtgctttgctcccaagaatcccaccgtggactctcgaagccctgggtacatagaagccagtgggaggcctcatcgcagtgctcttacagaggcctagaatgaagaccagctagggcctctgtagccaggagccagcaaacaccctgggcagaccaccgtggttctttcttctctctctttcgtcagggttagtctcaggaggaaaatgctgaagaggccattcgtgcacactgttttccagagagaatattacatttacattgactgctctacttttattttttgaaactttgttctgatttcttaggctaacaaaggcatctgtcgtgtgtgtgtgtgtgtataatatttgtgtttctttattagtataagtaaacacttttatttgttgttttgttttgctatgagtttactgtctgctcccaattctttgaatatctgtttatgagatgaaatgatagtatacttaattgacccccaaaaattccaccagagaactcctaaacctgatagacaacttcagcaaagtagctggatataaaattagctcaaacaaatcagtggccttcctctacacagagaataaacaggtggagaaagaaattaggtctgtttatgagaaatgttacaataaagaatacttttctaggctgggtgatggggtcagccaataaagtacttaactgtgcaactaggtgaacctgaatctgatcaccagagcgtgttaagacaccaggcatgcttttataatctgtaatcacacacttgtaatccccacactggagagacagagcagagggacctcacaactccctgctcagccagtctggcctacttgattagtgaaagactctgcctcaagaaaacaagatggagcacatctgaggaatgacacccaaggctgtcctcggccttccacagacacaccagactcacttccatccgagccccaggaatgaaactgtgagacactattggtctctggtgcccactgaccattgagacccaaggttctttcatccccaagagctgagggcagccatcctgtcagtgcagccatgctgagcatgtgtgcaggaggcaggggagagcaagagcgtttgcgaagggccagccctgccagcttgattagagaaagtcagggtacaattgaggagggtggacgggttcagagaccaggacagacagagacagtttttcagaggtggccagtaggagtcaggtgaagctcttttgaataattgatgtaattatgcttcccctaatggttttgttagccctgggcagctcactgtgctgatgcagctgtgtgcttacaagcagataaaggaaaggacctgactgagctgtgggctccatcagtcaaagaatgacaagaataaggaaagtgtgtgagacacatgcttagtaagtgcctgctgtatacagaggagggcactgtgcattgttaccaagtgagcaagccttgctccagcactggtccacaagacaccatagctgttttgtgacagctgagtcccccaggactgcccaaggccactctacaacaactgttaactcctggtctcagtttcataaccaaataggcgggtctgtggcctctcacctgtgtggccatctcgatacttttccagttttctatttttatccttccgacatttgtcacagtgaaaagctgaatccttatcctcaatggagaaagatgtggatatttttttttaaccaggaacaactaagccttacccagatgcacattatctcaggacgcccacgccctttcattttggttttggagttttcttgttatttgtttgttcatgggactttttgttgtttctgttttgttctggtttaaagttagggtttctattgctgtgaaggggcaccatgacaaaggcaactcaaatcgctcttctgctttgaattcctcaggggcttcctatagccctttggattaggcctagaaggcctactcatgctcggattgtctttgcctgtccctgctgacctggctcttcttcctcaagcagccccttttggagggaccccggacattgtttgtggtgcttgctccctctctttgctttccctgcctgatccctaagtgtcctgttccttccttccttgtcctttctcttctctacatcacatctgaggttcagtctggccacccagccgtgcacactcacctcacccacacactaaacttcttttttgggtttttttttttggttggtttgtttgtttgtttgtttgtttgttttgagaccaggtttctctgtatagtcctggctgtcctggaactcattctatagaccaggctggcctcaaactcagaaatctgcctgcctctgcctcccaagtgctgggattaaaggtgtgcaccaccaccatctggccacacgaaacttcttgttaaagcttatgcacatggtcgttccatccatccctggaaggcatcgaatgcccatcctccttgcaagatcccagtagtaacgaggtcattcacgactttgtccatagcaactgttggcagcctgtttgttgactgactcatgtgccggttgtgttgagaatcatgtgtgaggatcttttagttcctgaaagggttgaaacactgatgttgtcctgaagaactactttgtgattcctttgttactgtacaggggagagcctgagcaaatgagtcgttgcccttgttaccagcctttccatgcctcaggttttgactggatgaaggagatgtgctgtgttggtgggcagtcctgccttcgcccagttcaccgactattgaggaagtagaattgtgctgaacatataagacgccatattttatagtctgtgctgctcctacagacacaataaaaatatatctggcacatttaacataaaattgaactgattctacatcgacagaaatcatagccctttctgctgcagaggaagtcagtcttattaggaattggggagctgtccagtaagacctccccatgtcgtaggcattatccacttttactgttggggtctgactgtctcaaagcacctgctccttgtacctcttactgccaagtcacagtggccatgtcatcaagtgacactactaacttctgcaccagctagccagatgcccttgccctggttgctaaggtctggatggcattgctcccacaaagcaagaaagtgtgtgtatgtgtgtgcatgcattgtgtgtgtgctgtgtgcgcgcgtgtgtgtgtgcacatgtgtgtgtgcgccatgcagctaacactgcctgctccttttcttacagagctgcaggaactggagggcagcagtcgacctgtgtggacgcctgctcacagcccacggacaaggctatggcaagaatgggctgcccaccagccacaccacagactccttgcaggtgagagctcctattgtggtattacctggttcatcatcatttggggacatatagggaccgtggcctttcatgtaaggtgaacagaacgaggatttccacaggcccttccttcccaaattaactgcatgtttaatccttcctaaaagacttgagagtctgtctccagcaagcatagagctcacctgttctaaaccgaggcatgtgaaaggagagatgtacatggaagaaacctcctctaatgaggaacagccttgaaagtccttctggactccccctcacactctctgccactgagaagagcttccagaggcctatctgtggagcagcctgtagtaggcttcttgctcagccccgctgccctcctgcctcctgcccctgtgtctagagtcacactcgggggaatggtgtctagcatcctttcatgcctctactcttgtttgtaaagtcctgaccagtgtgctcttctcagatacagtcctctcactgtcctgaccatggcagcttccttccaccccattgctcagtggattctccccatctgtgggtcagtataacgccccccatgtggtctcatgacaggattttctgttcttagtttgataggtattccaccaaagcccatacactgtgtttgccttacccccctgtcctgtcggtaagggaagaccagccttcagtgaggatgtcactctaccctgagtcctctctctctgctgggccgtcagcattatagccttgggtgctcaccttgctcacacctcacagaccaccctccaagcctatggtcgtacccttccctgaccttgcaggtcctcctcagagtcagcccttccattctgaagggccatcctccgccaggctgagtgccccacccacccgtccctgcacttctctgctgtccacactggtcccggtcccagcaggaagcggggatgttttctcttccttagctgatgtgctgctcaggctcgcaccttgagctactgcattaggttcagttaatgaaattccccacgctgctgtgtggagctcagcagtgtgtttgtaagcatggaactgtgtaaactggaggacagcagtaaccgtagccctgagctctggctttcttatatagaggcagggccccacacaaggccaccacgacaaggacagggctgacttgggtgtcctatcctgcatttcagctctggtttgtgaggttggcgctgctggtgaagttgggccttttccagaatgctgagatggagtttgaaccctttggaaatctggatcaaccagacctatactatgaatactacccacacgtgtacccaggacgcaggggtaaggcagtgagtgctgcttcatgccaatgtatgtgttctactgtgctttatacaaacttcgaaactctggcttttctttaccttttcaaatctgaaaaaccaaatcagtagcctagcacagccaccattcatgcagttttgtgaacatactgactaggagtgattggtgttttctgggtctcttagaggccagctgacaagcacctgctagaacctgttacccagtgttctccaagggagcaccgccattgtgccacagccgcacaaaactgcatatgttcctgaagtttctgttggcagctgcaggaagactctgttcttaatttattttaagattttggttatagcaatggagggcatcacagtctctaccgtaacacaaggccatagcatggactgttctaggacaggggcaaaaagtaaggctggagaaaaggagattaaaactgtctagagccttttgtctaagtgtagtggtttggataagaagccttactccccagtgggtggcacttattggggacagttaagatatgtggccttgctggaggaggtgtgtcactggaagtgggcgtctaggtttcaaagccgccagtgcttcccagcacttgctctgcctggtggttgtgaatcaagatgtgagctctctgctgttcctttgctccgccatcatggactctaaccctctgaaaccataagacaaatcaaccccttccttccataagttgctttgtcctggtgctttatcacagcaatagagagctaaagcacagaggtggagggccttatagaggcctcaactctgcgtcacacggagaaagccatcttgggaggacattcaaacatatggaatttcaggccattctcattcaagccagtacaccatacttccctcattactgggttaaagtcccctagaagtcaacttaaggaaggacaggtgattttgattcacggtttcagaaggaacacagtccctcatggacgggaagtatggtggtgagggctgtgaggcagtcacagctcatctgcagtctgcatgcagagagatgaatggattgctggtgctccgctcagtctctgaattcactcctgggccccagcccatgcgatggtgctgctcacatttagggtgggtcctcccatgtcagttcagcactttgagaaatgtctttacagacccagagttacatctcctggatgattccagtctagtcaagttgttaatgaagaggaacagcccctgtcatatgcaaaggtctgacaggttaagggcgtcactgtgtatgggaactggggggacaaggattctagctagtctccttttcttgatttctcggatcatcaggagacaactgatttttctcagaagagtagctattttcctgaaagcataagaaatgtttcctcagtccatctcggccgcactctgccttaaccgcaaggttagcaactagtttcaatggggttttgtctgtgaccaacaaagcatagaatgtgaaccacagaggctcatctctcactggcaccaggctactaaacccatagtcacatagctgcacaaaggctctgtgctattcctggtgacattctcgagaattgcagatgcaagattactatctcatcccagtagcttctgagcactggacagctgttggggacagtctaagcaggtgtttgctgtaggagggataaaaagctcagctcccctgggcttctggccaccactgtcctgctgctcagtctcagcaggcctgctggcctacggtaactcagaggcctctgcaccacattcctctgtgaggactttccaaggaacaagcttccttgaaagatagcaacatgtttaagtccaggcatcgagtggtccgttgtcgctgtccagtttaaggccatatctcccagcagataatacagcttgaagaacatttaggtacccagcctgcagatgtgccacccgaagagcaggcagatgtgcaggctgaggagcaggcagatgtgcaggctgaggagcaggcagatgtgcaggcagaggagcaggcagatgtgcaggcagaggagcatgcgggtgtgcaggatgaggagcaggcagatgtgcaggcagatgtgcagcctatgttctgctcctgcccgaaattaagtggcacctggatgtggatgaagagaagacagaagctgtgcatcatgaagcagctatttcagattatgaaatggacatatatcatgcatgctcaagtgttaatatgcattcacggtgataggctggatgctggctaatgctgcttatcattttgtggcattacaagcataaatgtaagaattgattcattcatttcattttagctcacaatatataagcaaagcaaaccattaacatgtgcttttaaaagggggttatagtaatacaaacaaataaataacttttatgaatgagctttaatatatttcatttaagattgggtattatagcaattcatgatattcataacaagacttgatgaactgtgtgtggagctaatgaagttgagtttttttgtttgtttttcattcataaaagggacaatgctgtatttgatatatttctagaacatttaagcagtttctatccaatgttcagctgttctgcaagtcccattagctttgtctactgacccttagccccacttggtctactgtgcagagttctcttcttgctcatgggagcagcaaggaggacagagttcaggcagcacagccccagcattcacagtgtcctgtcctctgccctctgccctctgccctctgggcctgctctcccaccacacttactgctcttgccctgccaaggctgcatgtccctccccagcactgagggcccatgaattcaactcccattaccagtcctgccccctcctaaaatccgttccaaccaggagctcccgtacttccagatccaggggttacatgtccgcacatattcagtgaccatgcttgctctctgtgtcaggagcttgtcttccttggtttgggaaaaaccactttccctgggttgctagaattccttcctgggaggagatgtaaatatctgtccttcctcctaaagtcccaaggacacaagagtctcaatcccaccctgcagttccagagtagaggtgagggttacctacaaggcacaggcgcacctctgcccatcaggctgtacaggaagcctttgcccagccaggatgagggcttccccgagctacatagatggagccccctcctctactcttctctagcctgcattctctagaccctccctgagcttggatgcattcactcgaagtttcatagaacaggtggtggggattggctggatagtcagggaagggtctcctcttccttcatggtgggctgtaaacagtcagcaagcccaactgggacaatccttctggaaggggacgcagctgaactcccccaggatgccaatcacctggctcaagagcatttgaggcgcagtttagcctcttttcagtgccgggttcctacgaagactagcataggcatcgttgcacatctctctgtgtgaacatctatggggctctccaaggtctaagttaaaagtggttttactaaagcctgttgtgccagagttttcagtttagccagattgctgttaaaacagccctgcgccctcctttccttcccagcagcaagatgtggtttcttttccctcggcaagtcagcagcctggttggactgacttgctgggcctgagccccacctgttggtcttactcttcccctgactcctgttctgcggggcctcctccccaggggctcactcccacacaggctttgtttcctgctgctcatttattggtgttcttcccatggtatgggcatttagtcctttgttagtaattttaaagggagcctctcccattctaggaaggataatttccaggcctgcaggagggccctctgatttcagaggcccaacctagcctttttatttggcagcaactcctggtgggcccatgtactctatatctaaatcataatcctggcagtgatgttgggatcagactaggaattaaggctattttagtcagggtttctattcctaccaaaaaaaaaaaaaaatcatgaccaagatgcaagttgaagaagaaagagtttattcagcttacacttccacattgcttttcatcaccaaagggagtcaagactggaactcaagcaggtcaggaagcaagagaggccgtggagggatgttacctactggcttgcttcccctgatttgctcagtttgctttcttataaaacccaagatgaccagcctagggatggcaccacccacaatgggctgggccctccccccttgatcactaattgagagaatgcctcacagctgtctcatggtggcatttcctcaactgaagctgctttctctgtgataactccagcctgtgtcaaattgacacacttaaacagaggcacatggagacatgtaccagagaactttctggaatattttctttctttccctctttccctctttctttctttctttctttctttctttctttctttctttctttctttctttctttcttccttcctttcttttatgactgacaatttgttttaaagatttatttattttatgtatatgagtgcactgtcctgtcacttgctgtcttcagacacaccagaagagggcatcagagcccattacagatgtgataccatgtggttgctgggaattgaactcaggacctttggaagagcagtcaatgctcttaactactgagccatctcttcagcccctggaatattttcttaactaagccacagcacactgctgccctggttattgcccagacagtggcatagctctaggtacatgaatagtaatccccaggggccatagagagctgttggcaactgcacaggtgccctgctctctgtggagacctgctgttctccctccctcaggtccacttgccactttctccttctccaacaaaaggaaacagcaagtacacttagcttggcagatattcctgtggaatcttctgcgtcaaaatgttttgggcccagagtcagacaaccctatgacaaacccagatttgtctcagctatccactgctacttctgtactcccagggggtatcgcaccctccccaggagatggctgccaccccacccctggcatggagggatgaaacaaagggatcaggttatgtaccgagcactagggattattttggttttgtctgtttttctgcaatgttcaggacagaacaactgctcttagggacttaagatcgctttcccaaccctgttctctgattggctttgagaaccttccttgtaccttctgggtgccttctgggtttttttgtttttgtttgtttttgtttttcgagaaacccttcgagacagggtttctctgtatagccctggctgtcctggaactcactctgtagaccaggctggcctcgaactcaaaaatccgcctgcctctgcctctgcctctgcctcccgagtgctgggattaaaggcgtgtgccaccacacccggctttcgctgcagtgcgcaaggtactgcacatggtactgcgcacgtggcacggttgtaactgatgaccagccactgagtcgtgatttccagtgagctaactgtgtgcatttgctgtgtttctgtctttggaatgcccgcacaccaccactttcagtctgttcagagccctctccgtgagaaggaaagactcgccatggctcgagtttggggtttccatggcgctgcttatctttccatggtcccttccctttcagtgcatgatctcacacgggaaagaaaacacattctcattatctcagtgcacctgccagcggtgccccaatgggctgtggtctgtgctaggttagggttgcagcgcctgccatgctgctatagacactcacttctgaacttagacctgaggacagatcaccctcaaatcatcgagccagatgtacagactctcgaattaactgagtgctaagtttccgtcctccctgctgccatctgctcctcgaaattctcacccagtcttcagtcttcctctgctccctccagtgtctgcagctcacaggtctctttctcaggcaaattctgaatcttttatatccacacaaaacctgacatggctgcataatattgtaaacatctggaatttcattctttactgcaaagtcagtttacctcccacagctaacatgttaggctgacattagatttagatttatagttcacattactctgcctgaactcctgagtaccgagaagggtgtcctcctgcttcctgcagctttctgtttccccgacacttgcgacagttgagaagctacttggagcactacctggattggatgacctagtccatattttttatcactctacctccatctaaaaaaatttgatcaaataataaatatttgatctagggtactttttgtttacataccaatgtagcattaggtggaagatgtcttcatagcattgagagtagtatgtgtccttgaacactctcacacagcggtatctcagcagtggagcatctcagggagactgattgagtgatgagtatccccatcagctgccaacctgctccccccaccccggtgatggggaggaggataccagggaggggagagggtgtccagggtctcctgatggatcagtgaatctagttaagtgtccctgttacaaaaatgaaagaggaagactgagaccaacctgtgggtctgtgccttagggacggaagaagctacagtgggactctccccacatgctctctgttgccagtggcgaacatacatatagtgttgggtacatggcagcaagtccagctgtgcctctgccccacgctgccaggagctgcctctctccgagagcagcagtgacccatggaggtcacacccatgcggctctctgctttcggttttcagtgcacacaccaaggcccagcagatttctagcacattcctccctgactttccacaatggtggtgtagcttttcaacactgcaggggacagtctgaaataatcttcaagtagttgtttttatttaatgtgttctctctctctctctctctctctctctctctctctctctcttcacccaccaccaccaccccagcctcatttaatattttctaaacaactaatgagaatacttcctcagtattcatgtcaacctatttttagacaggccccgactgtacatgggagacacacacacacagaggactagggtcttcttacagattttgactggccaggctttgttgtactgggtagccaaactgaacctgaaggatgctgaaattcccagcagctgagacaggcaagctcgtccatacttggggagtgtggtggcttgatctgggcacttgaatgcctggtgcccaggtagtggtgctgctagggggcgtgtaacctttctgagggaagtatgttacacttgagtgtgtgtttacacttttagagacatgttgtgaccagggactggcctctacttggttcttaaaacttgccacgtaacttgtaagttaaatccgtttgcttagcatggaactgacagacagtatttcccagctgttctcttcctgtctcagttctagagcttcctgttctcctatgtagttcccatcagtttcctctttcgaatgcagccacatgccttgtgctgatgggcagtcctgaagactctaatctggagaagcctctagtgtgccagcagacctgtgagcaggaaggacaccttttcctgctcctgctctagctccactctgtgccaagctagcaggagcccaggatggagagatggcctggctgagatgtctggccctctctggcagcctcaggaacaccttctgagccctgttctctgagcccaggatagggaggtcccttcactgagctatctgccccttctctggcatcgccaggagcacctccagagctagttgctttctttgcagccctccctgctgggaaatacaaatccactgtcttagtcaatgtttgataccatgaccaaggcaactcttataaaagaaagcattcaattgagggcttgcttacagtttcagagggttatttcattatcatcatgaaaaagaccatggccatgcaggttgctgagaacctcatcctgaatatgggtgggggggggggggccctgactgagcttttgaaacatcagagtccacccttcctttaaggccacacccccttattctcgtaatcctttaaagtcactccctggcaactaagcattcaaatgtacgcgcctatgggggcattcttattcagaccaccacattccctctccactcacactcacactctggcctgctacagtaatgtactctgtatagctttcattggtggccatttggtatctgctactgaatttatttgtgagaacctctgaggttgctgcagagctgtggcaatagtggtaacatctggtctcccttggtaattggctagatatgtaagatatgacttagcagagaaaaccagcttgtattctacagctaaaccaaaaatcaaaggacttctgttcttgcttccaatgcaacacctgtgtgctggctagtgttttgtcagctaaacagacagagagccttagttgagaaatgatctaccagattggcctgtgggcaagtctgtgaagcactttcttgattgatacttaatttgggaggacccaagttgtcggggtccgtgccacccctgggcagggggtcctggatgatataagaagcaagccagtaagtagcactcctccatggactacaaactggaagatgtaatattgtaattgttacattttgatcatggtgtttcatcacagcaatagaaactgtaactaagacaccctgtaaatacttccttcctctggacagtcagaaaacacacacatccatagcaagctcactaatttacctgtggtttctactctaggctctatggtccccttttcgatgcgtattttgcatgcagaactgcagcagtatctggggaacccacaggagtccctggaccgattacacagggtcaagaccgtctgcagcaaggtaactgtcatggtgttcagtcctcttcctctgagcattcacaccacggcattctccaccggtccccaagggaaactgtctcacttcttcctcatacacaaggttctggaatagtgtcactatggtatccatacctaaagtgtttgtcaaaggctagagactggtttggggctgagccactgtaagccagttgcccagatgaagctctgctgtcttgaagactcacaaggactggacagtgtgtgtatattccacgtgcctggcttagatcagggcgatgctcttatgcagcatcctcttatatggagacatcacttacttttcataaaggagtacagtgatggttttgtttattgcctttgagtcatttggtgacttctcgtgtctggtttaaatggaatcagtgtactacactgtcatgacacagaagcccttggctgtcactgtctgcagatgcctatcttctgctttctatgcctccctttctggctctgcagactgtctgttcctccaggtctcaccagaggtttgcaaactgattgggaaagaacccacacagcagagacattcctaagagccatttgcataaataggtataatccataaacagtaaggtacaattagcttgaggttaatttcatttgccagtgcagatgaaccacccctactccacaatcccaggtagatttggcttcgggtaacaggtagaaaggtttccttagagcctctgctgcagcagatgaggctctgtctcatgaactcagaaaaagaggcgcgtgggctgggagtgtggcccgcttctctgctgatggctgacaagacagcgtgagagctctgttccaggaagggttggtgtctttgctaaaaggggtttctgacagatgggcgcacttgggcttgccgctttccagtagacaaagttagaaatacaggacaacagccaccaccatcctctcctcgcgggccggctcgggcaggccagccgtcagccccctgatggctctgcccgctgctgccgctcccctgatccagatgctccactttcccactgctcctgcggagaacaaattagctgtgacttaatcagagacgatggggcattcggcaagccacttaaagaagcagaaagagagactgaggagcgcttcatccctctgggctgcagacaggcgccctgcctcgaggctcacactcctgccccgcatctgtctacccagagcaaactgccctcaacaaaggagctagaacttccatcagctgggtgtgcagggcggctgccctgctgggggtcacagcagaagcctctgattggcacgttgcaaatctcgggcatggacaagaaagccactgggcactgcgcagcagtatggactctcggtccaccaaagagctagagagggacacacgagaacccagagaaagccaggctttccggctagtaaagatgtcttccattcagtcctctttgcctttcttttcttagcacatgcatcccctccgactggtgtgagtagtaagaaaagcacacacagacaggaggacatctggagccacacaaactgggtggaaacacccaagtgtacatcctgaccaggcctggcctgctgtgctgagcaatgctgctagtggcctgcaccagtgaccactcaatgctggagcagtgggggtatttaataattcctcaagtgtccaagagcactctgagaagcctcttccctgtgggaagcctaccttccagaaggcccccaggtagccatggtagagacgggaaggcctacctattggtgtctcacatgtgtgtgctgagacctcatgactacagcaagcctcactcatgacagctcctgcaggccagggccccagcccagagaggtgtgcagcaagttaggacacctgcccagccacctactcagataactgtaaaactcaaagcaggggtcatggcctttaaatattgtggcaagcaagtggtaggggctgtatacagagtcatgcagggtgccaaagtcactccagacatcgttccccttggacacatagccttcccgtgctgtgggtgtgtagtgagaactatccacattttaggattggagtctgttattcaaatccaatctagtctgtgcccggggcttgggatccagaagagcccctctgctttagggagcctccttggcataggtaagtgccgcgtcaggagccctctcttccagccccacgcttcaccttcagtgttttcttcccacggcctgcccacttagttccaagtacctctttccatgactgaacttgatcacggcggtgagctcgtaagacacccaataataaaaaatgcatttcagcctctgcagattgaatggactgaaattctaacgtgtttcaactcactgcccctcatgggaagcttgaaactgaaaggtacaaggtaaccttgactcagctgcacactgcggtcggctgctgccgagcaaatgagtctgtggcttagagccgtctctttaatgttgattagtaggttagttgtgcctgctgctgggtgtggcgctgtattttggtgcatgcaagtacagcctctgtcaccaacccttgcctacttctaacttcccctggggagcaaataggccattgtgccttccatgtcacaccaatcagctgtgtctcctgtccactcgtctttgagtgggcagcactgcagcagcacccgtagggcacccgtagggcagacagttctcattcactttggctgtagaattgctgggtcatgcattaccgtgaaaattcaggagacagaaattgttgggcagaaaccagcttgttcagggtaggccctaaaggagacagagatgtcaggtctctcaatagatggcgagggccacagggagatgtgtctgtgttgcaagagcctgaagggactgtaggcatctccagcacaagcgtggctctgtcaggccttgcccttcccgcatcccctctgccttgctaaaatccttaggctacattccgaaagctagccaccaaagtctgttgttcccttatttggccacttctcctcctgaggctgactaccaaggtccagctatcaaagtattaaagtccaacaatcaaaccccccttttggccaccttaactaacatgcccaattcaaattagacacctcattctaacatggagttttcccttttccccttgtaaactgccatttgcctgtgtaccacagtttgtcctcgctatccagaggcagtcatttgtcctccagtcaaccactcctccccctcttccttgcctcttttctcctgtctgccttgtttctttccccttctcccttgtcccctatctcctgtcccttatccctgctctctgtccctctggagcaaataaatctacttgatacagagaacttgatcatggggtgccgtgagccaacttggcgatcccagtgctcatgctgggtgggccttaccagagacctctgcctcctaaaagtccccctgggtcctgacctgaggccatcatctgactttccccgtgggtcaaagcagttactgctctgtgagatgatcgtgtacactgaggggaagtggagcctcacagagtcttagaaagggagagattggctatggagggaggcagaagtaagccaaatgaggggacagatggaggacagaagccaaaccagagtcccccagaaggatgtcactccttcaaaacaggctgtcattctgcacattcccacctatgacattcagcatggtggctctgttctcggggttttaaaggccttacactcttgtttttcatggtcatgataatggatctagggcaggaactcctaagggctcaggcacccatcctggaaagccactcagagaaactagtcataaagtcagaaatggggccttattaacaccgtgaccataccaggaggagcagggttcatgtcctcaagtctgtgtgtaaagtggctctgttagcagcacagagacgccacggcaagcatgtggttccatagcggcgcccaggtggtcggtgggccacttgctgtcacctgggggcagcacctcatcagcaggcaccaggtattgctgggcaccaagaagttccctgtcacaggcgagtcttagtcatttgtcttgagtttgtcaacaggatctgttgatggctcttttctctcagaactgggaatatgtcatgccatcccctcttggtctgtaagacagtaacagctccaagatgtcaccgcacccacaggtttccatctggctccagtgcacctcgagtgggctgctaggtcgctccctcacacctgtcagtatcgctgtttgctcagaagaagcccccactccctgctttcctgtcctcatgtggcacctactccctcccaaaaagagagggagaatcccagagcactcatgccctgtcctgggagtcccagtgtcactgccacctgtttgagacagtaactggtgtttaagtgttcccccttgccctgttggccaagatctgtccttcttttggatgagtattccattggcgtccttcaggggagccctgccctccacacctcctccctcacagtgtgagcccgtgactctaggagcctagggtcaggtgtctggagaaacggctcccagtggcctcagtgtaggccacagcatcccacacagcctgctgagaaagctcccagaagttctagagacccacttactacttagcagtcagcaagcattagcctcattgctcccagatcacgcatttccaacccttttatatttgttacagggatgaaggcagaaaaaaaagaccacaggaaaaatctgaggcggaggagcagttttaatttttttaatttcttgttgctgttccgtgtaattaattttccctcggcacttttaaagtttacaaaacactataagtacattctccatggagccccacagtctgtaatgctgacgagaacagagtgttggggcgtccaggtgagaaatagacattagagatgataagcttaagtcatcctggacctgaagcagcatctcacggtgcctggagttaccactgcgcctgtgcctcactccaccaaaggcaggaagggctgggggaagagaagccgtttgtgctctgggctgacagcatcatacccatgattccctgtagtttacagcagagctccctgaggcgagggtgagctgtacagccctttctgcccagacaccccactcacccatgagaacacacattctgctttgtgttcactcagtcccgtgtagccactctgcactgtgcagtgcctagtcctgtgaggtcactgtcccatgttgtcatttcaccctgcattttgctctttacaaggtgttgtctcagaacagatttgggttgcatacagtatgtaacaaagtcctaaccactggctgaccaaaggaggaggaacacgtgaacccatgagttcaaaaccagcctaaggcagactgtaagatctgttttgtgagagggggaaaggatttcacctctcccaaattctaatggatttagggcaggaactcccaagggaccaagctcaagtacccatcctagaaagccactcaaagaactgagacaacatcttcccttttcttattacaaaataagctatccaactgacctgtagtcatagcttcagtgtcctacctgagagccgtgacctgggtttgcagattgcctgcttctgtggcactgcctgccagcacctttggctgaatctcccccaaagcttctctgtgtcatcacctgattctgggtgtgggggggcagggaaagagggaggtacagcttctgggtgaaggagcaactgagacgctgtctcatgcccatgtcggcattgtgggcactggctacagtggactctttatttcaatttggtagaggtgaaagaagtcctttcatcttcaggtttatccaataaaatacagtagaagtgccagccatcctcctgtagacctgcttcaaggcattatcattctgccacctgtgtttaatggggcctctgccctcagagcatgttccagaaccccagtacattgtgcctgctgagtggggcctagctgatactcgatctctggctcttgtttccaggacgagatgggcctgtgggtagaggtataccatattcacaaattcagcctctccctgcagtatctacattctctaaaagggtcagaaccctgcgctggacatgcccttctcactgtggtcacaaccttgggtggctgtccttcccactggtgctcaagccacttagtggcctgggacactgcagaccctggaactcttcacatagtccttacccaactcacaggggttgagaaaggctgtaagctgctcgagtctcttgtgctgtgtggacacacgctatgttagtgactgttcttaaaagcgctgcgacccatgcccaacacagaccactttacggtacagaggttgttttgattcatgatttcagatggttcaggctagtcacttgaccccatgtactttggcagagcatcacaggaagattgtatggcatgagcagttcacttgataacataaatagctagggaaccaaatggtcccaaggaccttttcctggtacctgcttccaccagctaagccttactttgtgagatttctagaacctctcagtagtgccaccagcttagcacgtgggcattaaacaatgaggggggatcattttacatccaagccataacacatatagaaagaagaggattccacagagtgtcacaaggccaggaaagcccagagcaggtagtagagtcctcagtggctctgcccttgccaccccatacactgcagtggggagcccctccttgttcccgattctctgctgctgctcctatgaagtgccccacttctccttcagagccagaacattaggcagattccaccctcccagtgggtgctggctgagctcgccagggctccatagatacagcttcccccagccctgaatgcctagtacagagatcggactgttctgaaatacatggtgtggtaggcttggagcacagttgtgcacatagatcctccacggccctgagacccagagaactgtcgccttcctgccgtgtgtggtttccgtcctaagtgtaaatgccagcctttggtgtgtggtttctgtcctaagtgtaaatgccagcctttgtcctagttccctgagctctcggactcggtcctgaatgctggtgccctctgctgtccctgatcccttcccttccctcttggctccgtgcactccagcctgcgggggttaagacttcagtcccttgtcggtttctgccttcacgattacttatcagaaaacaaattagctgggacatgccatttgacctggtttgatctggctcgtttctctcaaaggtcacagtctttaaccccgtgtctgtcccctgaatctctcagaggtcacagtcgtgagccccacatgtttccccgagtcacattccacagctaattgttctcttgcttatacaaaataatgactttacaaaggagggtgcccactgtggcatggatgagtgaagagaggacactcagtggtgccttccactgcctacctgcctcctaggggtagcccctggggtaatgtcacccagcaggtgggaggaggaaggctgggttttccacagagcagacagactgcatgaagaccttttccatgaacattatgcctgttttcctcctacacatagtctttactcttaacatatattcacaccctgcccttcaaagtaataatagaataataaatcttttccctgtgtcacagggaccatagaagcttttctttcagggaaaacccaaatacagatgaaacaatggaaaggttttaaccaaacaatcaaaactatgcaaagtaccagctttacaaaatggacccagtgctgaagaaaaggctggaggctcactggcaccccggagaaaggcggggctgatgctcccacagcacttgatcactcttgtgtacagcttttcatgaaaagaaaaactgaacgcccacagtgttcagtgtctgagaaggctctatgagtctcataagcctaaattctaccttccaccagagagtagggcctgctcttctcgttacctcctggtaactggtagacatcacaatgtaaaagacgcatctcttgtgaacattccttgcctgattggttttcaccaagagaaatttgctgtgtctgaaatatatgaggacagtgtagccacaaatccacttacagttttgttgtccttgtttgaaatgactgcagatcttggccaacttggagcaaggcttagctgaagatggtggtctgagcagcgtcacccaggaaagcaggcaaggtgagcattgcccttctgttggctgaacaccactcgctcgaatatgcaaggctcgacagtatagttggtccccactcttacccaacagtggatgtccccttcacccatttcccctgtagcatctactctggataggtgagaggaaggacatgggcttttacccagtaatgagaagtacacatgggctgaggacagcccaacccagctcctcggtgcactgggggcttttcatttgcctgcacagatttgcatggaagaggggaagtaggccacagtgtgaactgtcagtggctgaacatcctgatcttccatggtaccttggcaatcacctatggacacgtggtggactgcaggggcagatcagcctctaagatcatgtctcagtctctttccatttgctgtaatgaaatacccaaatctggtttaatttataaaggacagagtagtactggatttacggtctagagtctgggatgtccatgagatgatgctggcatatggtgagatcatccacattgtacagggcatcacatgatgagacaaggaagcatcttcttagctctgttataaaaccgccagtgaggccaggcacagtggcatatatttttaatcccagcactcaggagacagaggtaggagatttctatgaattcaaggcccgcctggtctgcaaagtgagttctaggacagcagggctgttacacagagaaatcctgtctcaaaaaaaaacaaagataataataataaaatcataataataattaataagtgaataaaacctccagcactgtgataaggcctcatctgaggactttacctaacctcccaatgcctttccaaggacccccccatttcagataccatcaacatgtggctttagggattatatccccagtatgtaactttgtgtacacatatctaccacagcagttattctggctacagcatgctgaatacatgccagtccctttcagcacgtttataattccctggatttgaagggttgggtgtgtatgtgtgctgtgtgggtgatttatatgtggtgtgtgcatgtgtgacgtgtgtgtgtacatttacatgagtatatcctgctattaactaggctctgacacccaaaggtatgaatgtatctgcttgccctagctgatgtaagcagtgtagtccccagctcagctcttactcctgatgacccaggaaccatcagtcagccctcccctcacttcaaatgtctgtgaagggatcattccaacacagagggggagaaccagtttgaaaaccaaagagatggccagtgaaggttctgaaccagaacagaagatggccggtatcagatgtgagcagaggtgcattgttcacggtctactgcatccatagcggtgggtactggacttatcctgtcctctcatggagcgcttttatggccacttctggtgtccatcctcagtaaagcctgtgaaaaaggcagaccagcattgttccaatctgaaactaaaggcctagggaagtggtcagttccaggttgtagggactaaaactgccaccaggccctggttctccacagccgctggacacgagcaggcgatgtgcatgggtcagcttctgccctgggcagcagatgctgtctctgcatcagacgtgttcacaggtttaggattgtggcttagaagtgagctcctgatgactgcttggacttctgtgtaagctgggctatatttcttgctgagatggtctcttatgggagcccactctgggcatcccactgagaacactgtcctctgtctccggttcttggggagacctggtaaggttaggcggggaggcggggggctttgtgtcagcacccagagtgcagcagttgccagctcgcaggagcacgcttgcttgtgcacactcacgcctctctctcccctgcagcctctgttcagctgtggaggtctcgtctgggccgtgtgctgtactccatggcaaactgtctgctcctgatgaaggtatgtgggcggctgagctgtagagcaccttgttctagcagacagtgtcagctagaggctgcaaggaagtgctgcgtgttccaataggcctgacaaggaagtgagccgtgggcctcagcagtcttcagtgtggcctagattgctcagtagagttcactcacacttgggggcctaacttgtcgttgtaaaatttccacagaaaacagtttatattgctgaatttaattgcaccggcctaggtctaaacagtctaattaaaactgctcactccgcccgaaaacgggcgttttcctctgaactccatccagaaaatctcgcctttgttctgattgttttactgtgagggtcattttttaatgattgatggatttgacatctgaaggcagtctttcccaccagaccctcttgtgaggagctcaccccgagctgtgcacctgaggagccagtgtgactcggggagctctgccgggctgtcagtcactgtatttccagtccattctccacgtgggccctgccagcgggttttcagcttctctctcatttcaaatacatcccatgcctggcttgcctcccgccctgggcacgggtggcctgccactgagctggcggccttgctgccagctgcaggcaggcactgaagccaccacggaatctgtcagcagcagacgcccagagcagcgctgttaacaccttccgggctgtggtgagacggctcatcagttctccctcagccaaggtcgtcctgctctgactgagcggccgccagcgggcaggttaccaaggggaagagcgtgctcctcgctttagagcgactggcagccctccacgtggccagctccttggacctggcaggaaagtctgtgaccacagcccagccataggacagtgtgtttcctctgcacctctgcagacaggtgacatgtgacattgggtgtagacaggctcttgtagtaggtgaccttgacacagaagaacgggtttcctaaaacctctccagctgtcctcacagctctttcctactcttgaacacattacagcttttagaagttctgtgtgagatatttgcacatggtctgttgccacagggccactttgttcctggtatcttcccacatccgcctccctggtgacatcattgcagagcctcccctacctccccatgggctgcagccctcagccaaggaggggcctgcttccttctgtcccaccgccccctgtgaggcctgcctctcctcactgctgtggcctgtagcagcctgagaaggcaccgggagcctccagtctcctgaagtctctgagccttggttgccttcttaggcttgcagcactggtggtgcccagccacaggctgaagatgctcagggaggaagtcgctgctcagctgcagtgcactcagcttgcctttctgagagactctgttagaaaatagtgtaacaaaaaaacgctttcctttgttttactgcagtagtgacaccgccagcaatgtaggcacaggcaccaaacgtctgcctgtgacatcctgtcacccaaggttctgaacgggacggattatcatgtctcaaaaatactttctccatggatgtaatttaaattaaaagtttggtttaatcttgattttcatgagttaaagaaatgctgtaaggaaagtggatgtgagcacatgcattctgctgccatctagtggacacaacaagtattgccacagtagctgggctgcatagctggggcctgtgtgccagctaacaatgacctaattaatcagccttttaatgataagaaatttgctcatatgttctagttctgagagtcccactatatatttccaggaacacccgcttgcaagacaaagcccttcgttcataaatgtgatatcctgaggtttcacagtagccataagatacctggacagttttcagcttcacgtccttatacctcccacacagcattgactattgtggcttctcttttgtggggaagagcctgccacacacagggtgcctcctctttgcttggaaaacactacataaagcctttgttggcaacagaacagccattaatacaatttagcagtcactcagccaatgcagtttttaggtgcaagtcaggcaagaatgcttttgcccacatatgagtgtttgtatttctattcaagggcaggtcagtgtagtcagaagagtagagcggacacactacaagaagctgttgtcagctggcctccaggttcccagaatgagtgatttcattgactaacagccaactaggtggccctcagtgacagccctgaacactccctctaacccacccccccaggcttgttgacacatgctaacactgatgccgatggcacctgcctgacaaccccttctctactgctgctttttcggatcagtcccaaacctgtggatccaccctgcctcctaggagaactgtaaaattctatcaaaactgaacctggtggtacatacctttaacaccaacatgggagacagaaacagatggatctcttgagagttcaagaccaactgagtctctatagttagttacaggctgtacagagctataccgtaagactcagtctcaaaaaagttatatataatgggtatatttatagcctgtttcttttctgttgggccattctcagtagcatgtacccttgaccctagggcaagtttgaaaggcagcaatgccaatcaaaaaatctaggatcctagcagggcttactcctgaggcatactgaccctccatgccatgcaccctggccctccatgagctgtccatcagaagcatcatgagcagggtggagcctaggtcacgatggcctgtgatcagatgcagtactgtgactcggcacagcctgccctctgctcggtgaaataaaacgtaagggtacgtaccaggttggaggaggagaccaggatggaccttaggggccatgggctagaccctggtcagcctgagagcaggccctcaagccgcacagggtggcgtgtccgtgtcccctcagccgtgaccctgactgcccaaaggctgccttctcccctgacacctcatggtgcatgcacacacacacacatccacgtgcacctgctggcacaatgagaaataaggccggctggccttgggcggggccgcagtgacaggcagcaaacgtggtaggagaggaaatcaaggcatgtgtggtctggctccttgtgagcatcaggccttgaataaaattagttttaacgagctgcacttgaaggtaccagactggagagtcttctttttttttttacccctgccaaactggaattttccctgtcgtctgtctctataacctcccaattagcaagctcagtcgctgtagtcccagtttagaggaaacttaaagtttagaatagagaaataaataccttccagaatcttatggttaggaggaaatgagcagtgccagccttggactggtcaccatgagctgtaactgagaggaaacaagtgcttggcacggctcttgccacagtgtttgctcggctacacgctacagaggctggaggaggagctgacctttgaaccctctcactgaacccaactctcataccttttcgtactgtggaccaaaagtgggaagtggatactaggtgggtggtagagagacttagcctcaaggaggggctgcaggcaggaggggtgtgaggctgctgctaggaaggtgcacagagctgaagcactgaagacaaagctcaatctgcaggatacagacgccaaggccacagcgccttcagtgcctctggacacctgcctctatagagcagcagtaactacatgtcattataggtcacagtgacatccatatgccctcaccgtcatagtaaagttaattggtgggtcatttcaatgcaggtattttgcctcaatattgagcacagaaaagtgagacactttcaaagtgtggctttgtgtttgaaggatgaaatggtgcagaactacgagtccttacaacagctctgccagaaaagagggagggaccaaatacgggggtctctggcttctgcttaggaagtgggagcaaaaagcagcctttgggccagatgctaggtccagagccctgtggtaacaagaggatgtatgtcacacagaattcagagtcctcagtcctaccaccattggtgggaggggtctagcactagcctgctgcccccacagctctgtgtgtgtgtgtgtgtgtgtgtgtgtgtgtgtacgtacgcgcgcgcgcgcgcgcgtgtgtgtgtgtgtgtgtgtgtgtgtgtgtatccctggaccataatgcactgcaaagcgctgtacagcttctccagctcacgacatgcttttggtctcttaccataggactatgtgctggctgtggacgcctacctcacagtaatcaagtactacccggagcaggagccacagctgctgagtggaatcggccgcattctcctccaggtactggctacactgctaacagcccaaaggctgagtgcagtggctgcaatcctgtgaggttgcctgtgaattctgcccctcagaactcatgcaaacaggcagtagtagggaaatagttcagttcaaattcatgtgaccattaggtgttctttgcaatgattctgctgtgtggtgttctgtcctattgcagttagggtcatctgctaactgcagctgctgtgttgagggaacactcaagtgcaccctgacacagaggctgcagcaatgcataggctcggttcactaatatttggtacatcttcttgtcagtcccaggatcaggacctcccaggctgcccaggatatgggccttgtgtgtttgtccctggaggggctctaaatctggggaaagagggtgggttaagaacagctgatggcaagaggagaaagagcccacccactctggcacatggcactgctacactcgtgacctcacagtgttctgcagcctgcatggccaccacgccttaacagcatctgtagctagaatgccttcctggcatgtgggagtctggaactcatgggtactggagtcctatattccctgactccttagcaaggctttcctgcttgcaagacccagaacacaggaggaggccgtctgcatacatatctgagaacactgaaagtacttgtgcagagtggggaatctgatatttgggggggggggggcacagtggcccaaggataagtgtccctcatttccacagtgaaagccacatgacataaggaatgcttagggacgcgactggcttcttcactgagctggagctgtttgctgttgagtgcatgggaagacaatgaagagggtgcctggctccatcctgaatgggatcccaagtcagaggaggcccctggctcattggttttgaaagcctggggctgatacaggccagtgctgaccccgggagcaaagaggggtagtagtgtccttagtagccagagaaagggcacaaaacaagggaaggaggtttgctgtgtagtggggctgggctgttcagccgagaggactgctagaggcccatgctccatctcagggtccaatgcaaaggagaggtacagtccttgggacatattgctccaaacaagagatatagtatctgggccaaggaatcagagcccaaagaaagcagatcttcaaggccaagattcctgggcacctttgagtttggcctgcaagcaatgtgatgctggctctgcatcttgtacctgttccctcaccctcagtgcacaggagtaactgccctgtcttcagtgagaaagaggagcagcctcctactgcagccatcccagcaggctcatcttcatcagtgtgacatggccaggcttaagatacgtggccatcccaccctgacaagtcagcagagtgagcccttccacagccatttttgtctctccgagtgagtgaagccaaatgtggacgtgagctcagtggccgtgcctggtttctgtctggggaagcacacttgagtcctgaaaagcagacactgatgcaaacaggccgaggcactttctatacaacactaaagtgtgggactagaagtgctttagtacaaagcgcagagggctgtggcgaagtctggtgacatcatggatggacagacagtgggttcctagatgacgtcacatggggggattggaatattgccatgcgccttggctgcgggcttctcacttgtatttatatttgtttctaaggtttttctagtgctgtgtgacctaagaatagggccattcctttatcacctcacaattgctggaccacagagaaagacagctttgacaaatatgaatgtcccagaggcacatgcccctcccctagcctctgctatgtctcctggccacaaaccccctgttgtaattcttcagggtgttttattctgaagcagtgctcattctttctgagatgaacatagagcaagtctggctgtgagcaggggtcacctgtgctgactgtgtgccattcatgtgacagctggagcccagctcaggccggtagcacagtaaagggtttgttatttcggtatccagttcccaggtatgagggaactctcaaagcctttgcctgtccccacagcttgacttcctcctccccacactccctgccagccttcagagaggccaggtggcatctgcatatttgaaactctcaggcctgtggatgtcaccggcacacacagcatcctgcagaccatgggtgccttctgttcagaaagcaggtggagagtggctaggggagggaagtggacatgagaaggatgtcacattgaggaagcctgttcgcagaaggctggaggtgcccgtacccaggagcgtctcagacagtccaaaggcagagtaacgtagactctggacatctgcagcactcatcctttgaagttacttctctctgctcagactcggcccctccgcatcttttcacatggctcttgggagatcatcactcacaccagcaagatagcttttgaaccacagtggaagtgcagtagcccagggaagccactgtgtgaaagcagctctgctgtccggagcaggacaagagtatactcatgaccacttgacttcaaagccagaggcccatggctgtcagagttcactggagagccaggaaggtgccatactgtaggggactgcagggagccagggagtgactactggaacacagtggggaggagcagcagaggcctggggaggagccagggagtgactactggaacacagtggggaggagccagggagtgactactggaacacagtggggaggagccagggagtgactactggaacagtggggaggagccagggaatgactactggaacagtggggaggagccagggaatgactactggaacacagtggggaggagccagggaatgactactggaacacagtggggaggagccagggaatgactactggaacacagtggggaggagccagggaatgactactggaacacagtggggaggagcagcagaggcctgaacatgtcagagatggaggcagcatagcagatgggggtggccaattcaaagtgcatccatgagtagcaagtgtggaacagtagcccaaggatacctaacagatgacactgtacaccctgatacgtcctagacatcacattaaatatctgtattgtatacatgcagctcattatccagcagtcagacctcaagaaaactgcttagaagggaatggcctccagcttgcaaagatgtcaacccctccccaggaaatacaaaaacttttcttgtttattttatgagccattgagtggctagaagtgataaggacaaagaacaaatgaagtgatgtctttgcaggaacatcggtgagaaaggctggagtttttcagccagggctgccacccatccccaactcagccagtcagatgagcccaagctagggagagctccttccacttacccctcccctgtgcccgttgctgagtggagtccaggtcagtgcagagagccaaggggctctgcctccccagctgggatacagtggtcattctaaatgtctattaccctgctgcttagtaaagcagtgtaggacctcaggctcggtctcccctgtattgccctcccatctactctagaatcactctggttccaaaacaggcctgcagataagtagctagtgatctgcttcccaggcactggctctctacatataacctacatacaacctaaggcagaagtcaacccaagggtgttcccagtgacaaggtgcggccaaaagggagaaccactaggctgagaaagtcagcacaagcctcccaatacagaaaatggactttaccaaaatcatcactcatatagctcaatcctcagagatcctccaggtcgcaggaggcaaacggtgttcatgataataaggtccagtgcagtcaaaagatggtgctttgtggggcttgaggcaggctctaaatatgtgaatcgttcatctgcctattactggtatgtgaggttgctgtgtaacagggccctttatgtcttccacttcttattgcaagcctaacttagagcactgggctcccttcagactcttaaggcaacagaagagcacgaacagggcctggccagctcgcttagctccacagcttcctgacacttcccagcactgatggagagccacggctgagtttttagaggaagagtccaaacttcatttgccttagagtatgagttcccttcctctccctgggtgcccataccaaggggccctgctttgtttgaggggctgatggtttcctcacaaagggtaccaaaaggtctgctcatttacttttatagtaggattctatattatttggtcaaaatattactttaaaattggcaagctgatggtatctactctgtcctcaggcagaaataatctcagaaattgacttaggcttgctgtgttttaccaaagtttgtttttactgagtgctacaccagaatttattctcaggggcacagctgctaagttgtaagtcttgaaccaggcattcatattaacataatttgctgtcagagacgagaagcactttgggtggaccgtttgatttcattactggatgttaacctgagactgtctttaaatgtctcctgctcactgggtgggctctgggatcccctgtataacatacagggaacttcctcttctgacatgatactgggaacaactgtgatttttacatttacctcttttaacctgtcagctaacctgactggataactttgttaaagcagatcggagacataaaaacagctgaaaaatattttcaagacgttgagaaagtaactcagaagttggatggactgcagggtaaaataatggtcctaatgaacaggtaaatatcttctacttacttactggggtgtgtgtgtgtgtgtgtgtgtgtgtgtgtgtgtgtgtgtgtgtgcatatacacatgcatgctgagctcagaggcccactgtggggagttggctccgacacgcatgaaccccagcagctttgtgggactggggttccaaggacagcgggagactcaacctgctgagccatctcattggcccacaattagtctgacgtcctgtcctcagaactctcaggccaggtagcatgctgttcttctagaatcagaacataagcttgttttcagtatagccttacagcagtgtgtcaccctgccatcagctttcctgagtcccatatgcccagctcatgctccctgctctgaccacagcagaaagtgaacatggtcagtttataagccaggagtagccttggttggagctactgcatctggactagaccctggatggcagacttgccagtgagtctgacaattcagtcagcattgaaggaagccactgcctccatcgtccattggagagcacacgacccactctggtatacgtgcctgatgtgtccatggtacatggtgaaacttacccttggctctcctgtgctcactgccttctctgttgtgtgcattccagagcctttctgtaccttggccagaataacttcgcagaagctcacaagttcttcacagagattttgagaatggacccaacaaatgcagtggtaagacatgcagactaggtaccccacgggcccctctaccttttgctgaccagtaatcccagactcctgctctggcctggcctggcctgggctggcctttaaagaagtccacaaagggtctggtgagacatggggaccagggaccaccaagacagacgggcttgtgtgtgcgccaccctgagcacgtgttctttgctccaggccaacaacaatgctgctgtgtgtctgctttacctgggaaagctcaaggactccctgcggcagctggaggccatggtgcagcaggaccccaggcactacctgcacgagagcgtgctcttcaacctgaccaccatgtacgagctggagtcctcaaggagcatgcaaaagaagcagagcctacttgaggccgttgctagcaaagaaggggacagcttcaacacacagtgcctgaagctggcttagttccctccaggtctctgtacctgcagacacttgagcagatgggtcagtaaaagcatttgatgggtgtgcaggagcatgccttcggctggctgggctaccctcagacccgctgacctgcctaccatgtagttgcacaatactgcctgttggtgaaggtgagccatatgcatggcattcagaaacagggaacataaggacgtggggttcccttggtttgttcatggaagctaacttgttctttggtcacttctgaatactcgtttggtaaataatactgcctgttctcactataggcctaaacaatcacagttcattgtcttcctccctccatatcccaaacaaaagcattgctttgattattcagctcactcagaacacagctgggcaaggagcatcatgggctggcacagcatctatgcgctcctgtgcctgaaggcaagagaattgcttaacgcttgtatgcgctttttccactttgcaaaatgtaaaggacctggaaatggtcttccgttcccagctttcctaattcatgtgaaaacactcattttaaaggcaggatgcacggctgtgggatgcagcggagcatcatttgtgcctcacgatctgagggcatgggttccaccccagctccataagcaaaactgctggctcttcatgtctataataaagtgaaaagtgcttgtgttatttcctgaggagacatgagcaaatacgtcagaagtggcacagatgacagaccaaatggtctaactcgagacttaacttagagaagcagtgagtttagggggctcactcacaggagcatggatactcagagatgctgaaaaggtcacccctccttggtggggactgtcaaaagctgaatctgtggagcccctgcagaacttaagtcagctcagctggccagcatcctgttccagctgttgttactgctgtgtaaccttgaggagaggtctcatgaacatagcaagttacatgagacctgttcttccagggagctgtagttcacttcagaggaagaggccacactgcgctccacccctttatcacctccaattctttccacactggcttccttggtgtctcctgagctttacaagggctctgtagacgttggtttatgattgacattgtcccactgtacctcagcaacagtcactcgcaggagcttgactggcgggtgtcatcagtcatctttggagtaaacacattgcagaggccagttgtacaggcagcacatctgctttaaccctagagtagcgtccaccccagccacaggctgcccgcctgccctgcttttcagttccaaactgagttccctccaggggagcacacttagaatccactcagaagccagaagaaagcgctggagctccgggtggctgggagcagcatgatccagattctgggaaccaaactctggtcctcttcaagatcagcaagcagtcttacccctgagccacctcttctggtctgtgtactgcatgttcttaaggctaggactaggaatgtggcatgtgggaaaggcggggccaagtgcactgtcactgccaccaagggcagaagacagttgttcacagtcttacagaacagaaaccaggcctaaggggctgaggcagaacaccttgcctgttttgagccagggatgtgagagctaagccacaagggtcctcggctctggccattccagcagattcatcctggtcccctcgggcaccacatcaacagatggcatgccaggagccactggatgtccaggcagcagaaacagtatcctaaggtatggtctcacatctgcaggtaaggtcaacccagtgatcacccagcccacattcccatggtcttagtattctgttgctgtgaagaggcaccatgaccacagcaacacttataaacattaattggtttcagaggtttagtcattatcattgagggaaacatgatagcatacaggcagacatggtgctagagacggagctgagaagatcaagccactgggcctggcttgagcttttgaaacctcaaagctccccaccccccatgacacatttactccatggccacacctcctaatcctcaaatagtgcctcttcctggtcactgagcattccgatctgagccgactcatccgcccagtgagaggcaagggccagagaggaaaagaggctgctcttgcggtcctgaaagcatggccgttctatggattagctttgagcctctgtgttagagctacccacagaagacatcacaaactagacccccccccccaaaaaaaaaaatcagggcagatgctggtatacatgtcactcttaggatcagggcagctagctgggtgtggtggcacatgcctttaatcccagcacttgggaggcagaggcaggcagatttctgagtttgaggccagcctggtctacaaagtgagttccaggacagccagggctacacagagaaaccctgtcttgaaaaaaaaaaagagagagagagagagagagaaaaagatcggggcagctaaaataaatgcagactccctcacacagggaagcccagttatcctggcaacaacccaagctatcatcactctggcaccagaagtgataggctatttttcaaggttcactatgctaatttttgaacagccattattcttctaatccgtcataataaactgccacactccctcaggagcaatccccttttcttgtttttctcctcctagagagttaatgcctgcaggtcttggacccatttgaacaccaccacctctgcgaaaccctgtccaatcacactggtgaagagtaacaggccacacagtaagcccagcccttcatatggaacccaccactaggaagcccactgggagggaacatccagtctggagctcacccaggcctgggtttagcagagccaataccaacacttccatgtgccacacagcatccttgcttcatgttgtttggtacctaagctacaggatgtgcagacaggtcaaagttcatactggcctatggacactcatctagcataaaaacagcacacatgaaaagggaagcctgcgtgacttctgtttctattgctgtgataaacatcacaatcttttgggaaggtaagatttttatttcatctccagggttgcaatctatcatggagggaaatcagggcagaaaccttgggacagtaaactgaagcagaacccacaaaggaacactggtgtactgacttgctcagcctgttttcttacccccacccacagtgagctgagccctcccatgtcaatcgttacattaatcaagaaaatgccctacagacttgcctatgagccaaccttagaaaatcattttctcaattaagagtccctcttcccaggaaagcctgtgtctgtcaagttgacacgaaccaaccagcatagtgacaaagaacacattccctgcactgagcatggccatttattttgttgtttgagacagttcttccctacgtagggaaccagacacacatggaacactgggttctcctgcctccacctccagagtgctgggattccatgtctgtgttaccacaccctgcttggaccacttcttaactggtcctgtccctccccagcactctgtcagacccggccttctctctccctgaactccccagattctaccttgaggggagagccaggcccctactgcagagcaaacggaagcctgcacagtctgcttccaccaagacctgttccctccctaccatcccagccacaggggccatcagccctggtctttccccagagccttggtctgctggactttccatcgttagaactaaatatccacaatatgcatacaactaaagtccttgttgctcagggtgactggatttggagatggggcagagctaattagaattaagtaagaccctgtataaggctgaagcactggcatactctggaggacacagtagcacagttgtcaggtgaccccaggaggcccaaccctatgatggaaatgttgatctctttttaaaaaattttttttattatacataagtacactgtagctgccttcagacacaccagaaaagggcatcagatctcattgcagatggttgtgagccaccatgtagttgctggggtttgaactcaggaccttcagaagagcagtcagtgctcttaccggctgagccatatcttcagccccggaaatgttgatctcaagttcaagatagccatcctccagtctcatatgagtctcccagtccgtggtgtttcttttgacaacccgagactcctgactctgcagaggagctgcctcacttctggtgtgtcagcagcatataatccactgagaaccagctgcacccactcactagtgttcctggctctgctctcccaaaaattttgtcctattgcccatccttgttcctatgtggaacctggctgcgaggatcttaccattcacagccctgggagctcgtgagtgtccatctcaggcatgaatgaatctgcaatgcctctcctcagcaaggtcacagtaagcatggagtggagaagccaacacagccactagtatcactgtcctagatgatgtccctgtgtggtctaaagtcctgctctgggggagggacggggtagaagacaagcctctgaaagcatctctgtccctggccctgcgggcacccctgtgctcttggatgacaagcctcctttgttctcctggagaagcaataatcaattatgccagggcgcctgagagccatcaggattaatgaacgactggccaggctgaaagatgtatagacagcaaggccaatcgctgattgcatcgatctgtctgccagacaggtgtgtggactttggacaggagagctttctgtaacagctgacacagacaagcacatttaacccattgaagcataatgacaagggacagcagtaagttgggcatatagctcagaggcaggttacattcctagaatgttcaaggctatgggttcagtctccatgctggaaactatcaatgatcattaattccctagtgtagctagagcccatgtgattaaatcactcagcaataccactaactagagatcctccatacatgagactcttggcatagagcatatcccagacttaatggctgatgggaagagctggatttattggctgtgaccaacaacagggttgtattgctacaggtaagctggtacctacagatgggtttcccttcagggatggcacagacctagacctctagcggacagctgtgcagactgcccttgacctcactgacccataaagatttcagggcatccagtgtcatccacgtgtcagtgatcaagagcctccagctcacactctgcttaccatcaaagcagcaaggccacagtgtcacaccacctacccacagctacagtcagaacgggaaacctacctcaaaaagagctctgagctgagataccaatagctcaggctctcctcagaggggagagactaaacaaatcccatagcgttaatgttttatttcttgttgcttggggagtttagggaatcacattctaaaataaatacccaatcctgcgcctcactgaaagatttcagagctcctgagcagccacagccaaaagcattaggattacatcagtactgtatgaccatcttcaggatgctggggtgtgtgtatgtgtattgtataagccataaaattatttgaggtttttgaaaacttttacatagtgtactttccaaaggaaaacagttttcagaaaaatgattgttccagctcacacatatgaacagnnnnnnnnnnnnnnnnnnnnccatcttcctattcaccaactccatccacccacccactcatcaatacaacccatcttcctaccctcccactcatcaatccagtatatccatctatccacccaccaccatccagccactcccacatccacccacccacctacccctttatatgcccacctactcctgtgccccccccaacattcttcacctacttattcacaattctacctctggaaaatgctcaaaatcctcacagtggcaaattaaggaaaattcctgtcatgaaaccccctactttccacgtccaccacgtgagacttacacttttatcccattgtgtgatcagcccagcaccaacccacccgaggccccaggacaccatgcagagtcttggatctttgtagctcctccagcccagcataagcaaaaggctccacttcagatgccaaagctctattaaggaagtaaggagcctaatgggttctaccccagcaccaaacctgagagagcaagagaaaagcatgtgtctgaagctgtgagcctcactgtataatttgggaacacacacccaccattataaatggctttcctcctccagacttggatgtagtctgtacaaattgggccagaggccatttaatcagaagtggggtttaaagatgcaatgctaagacttcatcctcccaagcctacacatcctcattggttctgatgacctacccaactgccttgtttactatcccagagcggtagactgcctgcattccagctactcaagagacaagaggcagaggagtcacacaagcccaggactcccagacttacttttaaaaacttactctagagtccagtgtggaggctcttgcctataatcctagtattcagaaggcagaggcaggagatcctttgcacttgaagctagcctggcctacattctaggccagccagagctatgtattgagacccaacagcaaaaagataacaggggctcccatcaaacctaatgacctaacttcaatcactcagactctcggtaagcaggaatcaactccctcaagttgtcctctgccttccacttgtgtaccatgggacacatacacacacacacacacacacacacagtctcagaaaaacaaaaaggacgaatattctgggaaagctaagaaactgtgacctcacttaggtatattgacagagttctgttactgtcattggtagtttgaataggtttggcccccatagactcatgtgtttgcttggcccacagggaatggcactgacactattagggaggtgtggccttgttggaggaagtgtgtcactataggagggcgggcttcagagtcttatgctcaagcttcgcccagtgtggaagagcagtctgctcttggctgcctttggatcaagatgtagaacgttgcctcctctagccccacatctgcctggatgctgctatgcttctcaccgtgatgacaatgaacctctgaaactgtaagtcagtcccaattaaatattttctaagacttgccttggtcacagtgtctcttcatagcaatggaaaccctaagacaacttcctcggtctttcctcaatctgtgaggtcatggctcacacccaagacctgtcagcatgtagtacacgctggacagcacagtcagccttcaacgggaacaaggccattcacagtggacagttagaacaggagccgaaaagaataaaaacaaagcaagcagtggtaaacatctgtaaacacaactcaggaggcaacggcaggaggaagccaagcccagtccgcctggagatagaaaactggaacaggggctagtgctgaagcttggttggtgcagagcttgcccaggactgggttccatccccaacgctgtacaaaccacgtctagcggctgatacctgcaataccagcactcaggaaggacaatatagattaggacttgacgaccatcctaccttctcagtcatcctcaatttaatggtgactttgagaccaaccggagggacaagaaactctatcacaaacaataaaatgtggctggagagacggctcttgctgctcttgcagaggacacttaagggcttggctctgtctgacctcagtgttaagttcaaatcccaacttccatatgacagctgacagtcatctgtaacataattccagtccagggtatctgacaccctcttctgacttctggtggggacacatacacatagtgcacatacatacatgtaggcaaagcacccaaacacaaaatgaactttctaaaaaaaattaaacccaggcacggtgtcacatatctcagccctcaggagaagaagcaggaggatctctgaattcaaggccagcctggtttacactcaggaggcaaaggctggggagttcaataccagcctgatctgcatatcaagttccaggccagccactgctacagagtaagagagtcttaaaaaataatcaaccataaatactaggttgacagccaggctctgggggcgcatgcctttaatcccagcactcgggaggcagaggcaggcagatttctgaattcgaagccagcctggtctacaaagtgagttccaggacagccagggctatacaaagaaaccctgtctcggaaaaaaaaacaaaaaacaaacaaacaaacaaacaaaatgctaggttgacaaaagctagtaaggattggcccttactgacagtaattcagagggagagactcaggatgtgctacctgtacacgtttgagttctaaggctgaggcgacgtcagtcacctcccatgggtcaagctgcccctcctgtgtccctaaactgtcacggagatcacggtcatttacattgagtggccactcagagaatgcctacagccatcttctccagcatagatcattggggttctctgtaactaacatactacacatagacatatttcaggattcttgttctttttctacatctacactatgtaacccaaggtgctggagtagaaaaagaaaaaaaaattttttttttttttggtttttcgagacagggtttctctgtgtagtcctggctgtcctggaactcactttgtagaccaggctggcctcgaactcagaaatctgcctgcctctgcctcccaagtgctgggattaaaggcatgcgccaccaccgcctggccaaatactcaccaagaaaaatcttatatcttcctttgaatcttgattgtaaaaggacccaaaaccacactgataatatctacccttgaaagacccccaaagggagaccctcactcatatctcgggataatagcggacccccaagaactctcgagagaccaagcttgatgcaaaccacacgaggctttattggggaaagccagagctctgggaatgactcatatcccacgcaggggtagaggagttgaccccgaggagaaaggggtcccagtttttataggccctcaggggggaaaggagaaggaaggagtaggggatttccagatctaaacaatatctattctaaaatgatttctcaagaaatgggtatgggaggggtacaaggaaagagtctggtgcaggtgtagcaactccggattggctcggnnnnnnnnnnnnnnnnnnnnnnnnnnnnnnnnnnnnnnnnnnnnnnnnnnnnnnnnnnnnnnnnnnnnnnnnnnnnnnnnncacctggcaatgggcttcttcagtgggcacacacatgggttcaaggaacggtcaaaacattggcagacacacgggttcaaggagcggccagagcattgtgcacctctatttttctaaatcagtgaagctagttctgttaacaatgaaatctattttgccaatttcagggcttctgtaacctttaacattctgtcaggatctttcaccctgatatagaaactatgtacatataaaaatcacataaggaatctaaatgggaggttttaatgaaccaagtaaaatactgtaggtacacatgaatgtacatacagctaagctgtgagcatacaattaaggtaacttagttttaagaaagaacaacaaccccacttccccaatcaacaatcagcaaaggaggaaaacgtcatctggttagttgtgctggttataactgccctcttgcaggaggcatagcttcacaccaacagacacctaaagatctgggagatgaagattggccatgcatgaatgcacataccaatccagggctcctatacctctaagtcttgacagttagggaaaattaaggtcactttttcacatttttgtggcttccatgtaaaaatcacttttagagatgctttcatttaaagacactgatctcacaatcttagcaaagagagctagtctagcctcaagttcatatagaaaagcagaaaagtgagcaactttccattcggttaccacagcaggagattcacacagtgcagttttctctttgaggagcactgctatgctgttccttccaaaaaactcatgtactgtacacgggcatcaaaatggtcagctggccggttgtatggtgtccacacaggttctccaacaaacagccgcatggccttcacgtaattctagaaaacaagccccacatctcattgaacacttccactcatctatatgggaacccttgcagctacctcacctacttagggttgagctctgtctgacctcagtgtgagtgaccactgctaggcagcataagcatctgcagttcctgcttagggtccacactggagcagaaatgagtctggactccacccaccctcctacagtgccctagagaccagctccaggccctgctgcagggttggtaagaaaataacttgtcagcacttgtctaaacaggaaatgcagtctccatgaagcccttaccttcatcctgcaaataagcatacccaggtaaaaatgacaat

SEQ ID NO: 288 - DNA, 3360 bp, Mus musculus
acgcacaagcgcgggggaccttggatcttgagtttacttccggtcttccgtcatctcttcggacccttttcgcctgtgggtgacccgacctcaggggcgggtggcaggtgaggagcgggtcgcagtgaggagggtcgccggtaccctcgaccttcccacagagggcggcgtcctcgcgtaatcaaccgctctcggccacgcagagagtagccccacgaggggctggctccttcgggctttagccaattctgtgtgctccctgtggttttggacaagacaacatggaaacagctaaagatggtgagcagagcccaagtgaggcatctccttcagcccaggcaggtcctgaaaacatcccggagcctatgtctcgggaggaggagagccagccattgtaccatgaagagaccattgatcttggtggagatgagtttgcatctgaagagaacgagcccacatcggaagggtctcacaacttcggagataagcttaatgagcacatgatggaaagtgtgctcatctccgactctcctaacaacagcgagggggacgttggcgacctcggctgtctacaggatgttggggagccccccagaggtgccactgatcaccgactgcccagtagcacagacaaagaagtggtggacactctgagtaatggcagtgaaaccgatggagacgacactcccagagacatctcagacatgacacctgatagcagagcctctctgaaggaagactcaacacaggaagatgtgacgagcatgcctgcactggagaatgctgccacggaggaagtcgggcctaaggacagcctcgcgccccgagaagagcagacctcagaagtgtcctccaatcagtcctcctccaaagacgagcccttgcccgtctgcaccatcttcagccaggctaccgccactccctcccagccacacctgtttctacaggatggcttcgagtcccagatggtgaaatcacccagtttcagtagcaccagtgagatgtcagccaagacccctcctccgatggtccagcccagtcccagcctcagtacattttttggagatacaatgagctctaattccttggcctctgacttctttgattccttcacaacttctactttcatttcagtcagtaatcccaatgcaggttccccagttccagaaaagctgtcttcactcactgcccctgtaggagagaagtccccggattccaccagcccatcttactccacaaggatggatagatcggaatcaggtgtttctcgggcccctctggatgtccctgaatctccaaagccattttcacagatccaggctgtgtttgctggaagtgatgaccccttcgccacagccctgagcatgagcgagatggaccggaggaatgacgcatggcttcccagtcaggcgaccagagaagtcctgatgtcagtagcaacccagcagtatggcactgtgttcatagacaaggagaacctcactatgcctggcctcaagtttgacaacattcagggagatgcagttaaagacttgatgcttcgcttcctgggtgagaaggctgcagcaaagagacaggtcttaaatgccagctcagtggagcagtcctttgtggggctgaagcagctcattagctgcaggaactggagggcagcagtcgacctgtgtggacgcctgctcacagcccacggacaaggctatggcaagaatgggctgcccaccagccacaccacagactccttgcagctctggtttgtgaggttggcgctgctggtgaagttgggccttttccagaatgctgagatggagtttgaaccctttggaaatctggatcaaccagacctatactatgaatactacccacacgtgtacccaggacgcaggggctctatggtccccttttcgatgcgtattttgcatgcagaactgcagcagtatctggggaacccacaggagtccctggaccgattacacagggtcaagaccgtctgcagcaagatcttggccaacttggagcaaggcttagctgaagatggtggtctgagcagcgtcacccaggaaagcaggcaagcctctgttcagctgtggaggtctcgtctgggccgtgtgctgtactccatggcaaactgtctgctcctgatgaaggactatgtgctggctgtggacgcctacctcacagtaatcaagtactacccggagcaggagccacagctgctgagtggaatcggccgcattctcctccagatcggagacataaaaacagctgaaaaatattttcaagacgttgagaaagtaactcagaagttggatggactgcagggtaaaataatggtcctaatgaacagagcctttctgtaccttggccagaataacttcgcagaagctcacaagttcttcacagagattttgagaatggacccaacaaatgcagtggccaacaacaatgctgctgtgtgtctgctttacctgggaaagctcaaggactccctgcggcagctggaggccatggtgcagcaggaccccaggcactacctgcacgagagcgtgctcttcaacctgaccaccatgtacgagctggagtcctcaaggagcatgcaaaagaagcagagcctacttgaggccgttgctagcaaagaaggggacagcttcaacacacagtgcctgaagctggcttagttccctccaggtctctgtacctgcagacacttgagcagatgggtcagtaaaagcatttgatgggtgtgcaggagcatgccttcggctggctgggctaccctcagacccgctgacctgcctaccatgtagttgcacaatactgcctgttggtgaaggtgagccatatgcatggcattcagaaacagggaacataaggacgtggggttcccttggtttgttcatggaagctaacttgttctttggtcacttctgaatactcgtttggtaaataatactgcctgttctcactataggcctaaacaatcacagttcattgtcttcctccctccatatcccaaacaaaagcattgctttgattattcagctcactcagaacacagctgggcaaggagcatcatgggctggcacagcatctatgcgctcctgtgcctgaaggcaagagaattgcttaacgcttgtatgcgctttttccactttgcaaaatgtaaaggacctggaaatggtcttccgttcccagctttcctaattcatgtgaaaacactcattttaaaggcaggatgcacggctgtgggatgcagcggagcatcatttgtgcctcacgatctgagggcatgggttccaccccagctccataagcaaaactgctggctcttcatgtctataataaagtgaaaagtgcttgtgt

SEQ ID NO: 289 - protein, 804 aa, Mus musculus
PILCAPCGFGQDNMAKDGEQSPSEDSAQAGPENIPEPMSREEESQPLYHEETIDLGGDEFASEENEPTSEGSHNFGDKLNEHMMESVLISDSPNNSEGDVGDLGCLQDVGEPPRGATDHRLPSSTDKEVVDTLSNGSETDGDDTPRDISDMTPDSRASLKEDSTQEDVTSMPALENAATEEVGPKDSLAPREEQTSEVSSNQSSSKDEPLPVCTIFSQATATPSQPHLFLQDGFESQMVKSPSFSSTSEMSAKTPPPMVQPSPSLSTFFGDTMSSNSLASDFFDSFTTSTFISVSNPNAGSPVPEKLSSLTAPVGEKSPDSTSPSYSTRMDRSESGVSRAPLDVPESPKPFSQIQAVFAGSDDPFATALSMSEMDRRNDAWLPSQATREVLMSVATQQYGTVFIDKENLTMPGLKFDNIQGDAVKDLMLRFLGEKAAAKRQVLNASSVEQSFVGLKQLISCRNWRAAVDLCGRLLTAHGQGYGKNGLPTSHTTDSLQLWFVRLALLVKLGLFQNAEMEFEPFGNLDQPDLYYEYYPHVYPGRRGSMVPFSMRILHAELQQYLGNPQESLDRLHRVKTVCSKILANLEQGLAEDGGLSSVTQESRQASVQLWRSRLGRVKMANCLLLMKDYVLAVDAYLTVIKYYPEQEPQLLSGIGRILLQIGDIKTAEKYFQDVEKVTQKLDGLQGKIMVLMNRAFLYLGQNNFAEAHKFFTEILRMDPTNAVANNNAAVCLLYLGKLKDSLRQLEAMVQQDPRHYLHESVLFNLTTMYELESSRSMQKKQSLLEAVASKEGDSFNTQCLKLA

SEQ ID NO: 290 - DNA, 121062 bp, Homo sapiens
  misc_feature (1)...(121062): n = A,T,C or G
tcagggagttccctttcctggtcaaggaaaggggtgacagacaacacctggaaaattgagccactcccacccaaatactgcgcttttccgacgggcttaggaaacagcgcaccaggagattatatcccacacctggctcggagggtcctatgcccacggagtctcgctgattgctagcacagcagtctgagatcaaactgcaaggtggcagcgaggctgggggaggggcgcccgccattgcccaggattgcttaggtaaacaaagcagccgggaagctcgaactgggtggagcgcaccacagctcaaggaggcctgcctgcctctgtaggctccacctctgggggcagggcacagacaaacaaaaagacagcagtaacctctgcagacttaaatgtccctgtctgacagctttgaagagagcagtggttctcccagcacgcagctggagatctgagaacgggcagactgcctcctcaagtgggtccttgacccctgacccccgagcagcctaactgggaggcaccccccccgtaggggcagactgacacctcacacggccgggtannnnnnnnnnnnnnnnnnnnnnnnnnnnnnnnnnnnnnnnnnnnnnnnnnnnnnnnnnnnnnnnnnnnnnnnnnnnnnnnnnnnnnnnnnnnnnnnnnnnnnnnnnnnnnnnnnnnnnnnnnnnnnnnnnnnnnnnnnnnnnnnnnnnnnnnnnnnnnnnnnnnnnnnnnnnnnnnnnnnnnnnnnnnnnnnnnnnnnnnnnnnnnnnnnnnnnnnnnnnnnnnnnnnnnnnnnnnnnnnnnnnnnnnnnnnnnnnnnnnnnnnnnnnnnnnnnnnnnnnnnnnnnnnnnnnnnnnnnnnnnnnnnnnnnnnnnnnnnnnnnnnnnnnnnnnnnnnnnnnnnnnnnnnnnnnnnnnnnnnnnnnnnnnnnnnnnnnnnnnnnnnnnnnnnnnnnnnnnnnnnnnnnnnnnnnnnnnnnnnnnnnnnnnnnnnnnnnnnnnnnnnnnnnnnnnnnnnnnnnnnnnnnnnnnnnnnnnnnnnnnnnnnnnnnnnnnnnnnnnnnnnnnnnnnnnnnnnnnnnnnnnnnnnnnnnnnnnnnnnnnnnnnnnnnnnnnnnnnnnnnnnnnnnnnnnnnnnnnnnnnnnnnnnnnnnnnnnnnnnnnnnnnnnnnnnnnnnnnnnnnnnnnnnnnnnnnnnnnnnnnnnnnnnnnnnnnnnnnnnnnnnnnnnnnnnnnnnnnnnnnnnnnnnnnnnnnnnnnnnnnnnnnnnnnnnnnnnnnnnnnnnnnnnnnnnnnnnnnnnnnnnnnnnnnnnnnnnnnnnnnnnnnnnnnnnnnnnnnnnnnnnnnnnnnnnnnnnnnnnnnnnnnnnnnnnnnnnnnnnnnnnnnnnnnnnnnnnnnnnnnnnnnnnnnnnnnnnnnnnnnnnnnnnnnnnnnnnnnnnnnnnnnnnnnnnnnnnnnnnnnnnnnnnnnnnnnnnnnnnnnnnnnnnnnnnnnnnnnnnnnnnnnnnnnnnnnnnnnnnnnnnnnnnnnnnnnnnnnnnnnnnnnnnnnnnnnnnnnnnnnnnnnnnnnnnnnnnnnnnnnnnnnnnnnnnnnnnnnnnnnnnnnnnnnnnnnnnnnnnnnnnnnnnnnnnnnnnnnnnnnnnnnnnnnnnnnnnnnnnnnnnnnnnnnnnnnnnnnnnnnnnnnnnnnnnnnnnnnnnnnnnnnnnnnnnnnnnnnnnnnnnnnnnnnnnnnnnnnnnnnnnnnnnnnnnnnnnnnnnnnnnnnnnnnnnnnnnnnnnnnnnnnnnnnnnnnnnnnnnnnnnnnnnnnnnnnnnnnnnnnnnnnnnnnnnnnnnnnnnnnnnnnnnnnnnnnnnnnnnnnnnnnnnnnnnnnnnnnnnnnnnnnnnnnnnnnnnnnnnnnnnnnnnnnnnnnnnnnnnnnnnnnnnnnnnnnnnnnnnnnnnnnnnnnnnnnnnnnnnnnnnnnnnnnnnnnnnnnnnnnnnnnnnnnnnnnnnnnnnnnnnnnnnnnnnnnnnnnnnnnnnnnnnnnnnnnnnnnnnnnnnnnnnnnnnnnnnnnnnnnnnnnnnnnnnnnnnnnnnnnnnnnnnnnnnnnnnnnnnnnnnnnnnnnnnnnnnnnnnnnnnnnnnnnnnnnnnnnnnnnnnnnnnnnnnnnnnnnnnnnnnnnnnnnnnnnnnnnnnnnnnnnnnnnnnnnnnnnnnnnnnnnnnnnnnnnnnnnnnnnnnnnnnnnnnnnnnnnnnnnnnnnnnnnnnnnnnnnnnnnnnnnnnnnnnnnnnnnnnnnnnnnnnnnnnnnnnnnnnnnnnnnnnnnnnnnnnnnnnnnnnnnnnnnnnnnnnnnnnnnnnnnnnnnnnnnnnnnnnnnnnnnnnnnnnnnnnnnnnnnnnnnnnnnnnnnnnnnnnnnnnnnnnnnnnnnnnnnnnnnnnnnnnnnnnnnnnnnnnnnnnnnnnnnnnnnnnnnnnnnnnnnnnnnnnnnnnnnnnnnnnnnnnnnnnnnnnnnnnnnnnnnnnnnnnnnnnnnnnnnnnnnnnnnnnnnnnnnnnnnnnnnnnnnnnnnnnnnnnnnnnnnnnnnnnnnnnnnnnnnnnnnnnnnnnnnnnnnnnnnnnnnnnnnnnnnnnnnnnnnnnnnnnnnnnnnnnnnnnnnnnnnnnnnnnnnnnnnnnnnnnnnnnnnnnnnnnnnnnnnnnnnnnnnnnnnnnnnnnnnnnnnnnnnnnnnnnnnnnnnnnnnnnnnnnnnnnnnnnnnnnnnnnnnnnnnnnnnnnnnnnnnnnnnnnnnnnnnnnnnnnnnnnnnnnnnnnnnnnnnnnnnnnnnnnnnnnnnnnnnnnnnnnnnnnnnnnnnnnnnnnnnnnnnnnnnnnnnnnnnnnnnnnnnnnnnnnnnnnnnnnnnnnnnnnnnnnnnnnnnnnnnnnnnnnnnnnnnnnnnnnnnnnnnnnnnnnnnnnnnnnnnnnnnnnnnnnnnnnnnnnnnnnnnnnnnnnnnnnnnnnnnnnnnnnnnnnnnnnnnnnnnnnnnnnnnnnnnnnnnnnnnnnnnnnnnnnnnnnnnnnnnnnnnnnnnnnnnnnnnnnnnnnnnnnnnnnnnnnnnnnnnnnnnnnnnnnnnnnnnnnnnnnnnnnnnnnnnnnnnnnnnnnnnnnnnnnnnnnnnnnnnnnnnnnnnnnnnnnnnnnnnnnnnnnnnnnnnnnnnnnnnnnnnnnnnnnnnnnnnnnnnnnnnnnnnnnnnnnnnnnnnnnnnnnnnnnnnnnnnnnnnnnnnnnnnnnnnnnnnnnnnnnnnnnnnnnnnnnnnnnnnnnnnnnnnnnnnnnnnnnnnnnnnnnnnnnnnnnnnnnnnnnnnnnnnnnnnnnnnnnnnnnnnnnnnnnnnnnnnnnnnnnnnnnnnnnnnnnnnnnnnnnnnnnnnnnnnnnnnnnnnnnnnnnnnnnnnnnnnnnnnnnnnnnnnnnnnnnnnnnnnnnnnnnnnnnnnnnnnnnnnnnnnnnnnnnnnnnnnnnnnnnnnnnnnnnnnnnnnnnnnnnnnnnnnnnnnnnnnnnnnnnnnnnnnnnnnnnnnnnnnnnnnnnnnnnnnnnnnnnnnnnnnnnnnnnnnnnnnnnnnnnnnnnnnnnnnnnnnnnnnnnnnnnnnnnnnnnnnnnnnnnnnnnnnnnnnnnnnnnnnnnnnnnnnnnnnnnnnnnnnnnnnnnnnnnnnnnnnnnnnnnnnnnnnnnnnnnnnnnnnnnnnnnnnnnnnnnnnnnnnnnnnnnnnnnnnnnnnnnnnnnnnnnnnnnnnnnnnnnnnnnnnnnnnnnnnnnnnnnnnnnnnnnnnnnnnnnnnnnnnnnnnnnnnnnnnnnnnnnnnnnnnnnnnnnnnnnnnnnnnnnnnnnnnnnnnnnnnnnnnnnnnnnnnnnnnnnnnnnnnnnnnnnnnnnnnnnnnnnnnnnnnnnnnnnnnnnnnnnnnnnnnnnnnnnnnnnnnnnnnnnnnnnnnnnnnnnnnnnnnnnnnnnnnnnnnnnnnnnnnnnnnnnnnnnnnnnnnnnnnnnnnnnnnnnnnnnnnnnnnnnnnnnnnnnnnnnnnnnnnnnnnnnnnnnnnnnnnnnnnnnnnnnnnnnnnnnnnnnnnnnnnnnnnnnnnnnnnnnnnnnnnnnnnnnnnnnnnnnnnnnnnnnnnnnnnnnnnnnnnnnnnnnnnnnnnnnnnnnnnnnnnnnnnnnnnnnnnnnnnnnnnnnnnnnnnnnnnnnnnnnnnnnnnnnnnnnnnnnnnnnnnnnnnnnnnnnnnnnnnnnnnnnnnnnnnnnnnnnnnnnnnnnnnnnnnnnnnnnnnnnnnnnnnnnnnnnnnnnnnnnnnnnnnnnnnnnnnnnnnnnnnnnnnnnnnnnnnnnnnnnnnnnnnnnnnnnnnnnnnnnnnnnnnnnnnnnnnnnnnnnnnnnnnnnnnnnnnnnnnnnnnnnnnnnnnnnnnnnnnnnnnnnnnnnnnnnnnnnnnnnnnnnnnnnnnnnnnnnnnnnnnnnnnnnnnnnnnnnnnnnnnnnnnnnnnnnnnnnnnnnnnnnnnnnnnnnnnnnnnnnnnnnnnnnnnnnnnnnnnnnnnnnnnnnnnnnnnnnnnnnnnnnnnnnnnnnnnnnnnnnnnnnnnnnnnnnnnnnnnnnnnnnnnnnnnnnnnnnnnnnnnnnnnnnnnnnnnnnnnnnnnnnnnnnnnnnnnnnnnnnnnnnnnnnnnnnnnnnnnnnnnnnnnnnnnnnnnnnnnnnnnnnnnnnnnnnnnnnnnnnnnnnnnnnnnnnnnnnnnnnnnnnnnnnnnnnnnnnnnnnnnnnnnnnnnnnnnnnnnnnnnnnnnnnnnnnnnnnnnnnnnnnnnnnnnnnnnnnnnnnnnnnnnnnnnnnnnnnnnnnnnnnnnnnnnnnnnnnnnnnnnnnnnnnnnnnnnnnnnnnnnnnnnnnnnnnnnnnnnnnnnnnnnnnnnnnnnnnnnnnnnnnnnnnnnnnnnnnnnnnnnnnnnnnnnnnnnnnnnnnnnnnnnnnnnnnnnnnnnnnnnnnnnnnnnnnnnnnnnnnnnnnnnnnnnnnnnnnnnnnnnnnnnnnnnnnnnnnnnnnnnnnnnnnnnnnnnnnnnnnnnnnnnnnnnnnnnnnnnnnnnnnnnnnnnnnnnnnnnnnnnnnnnnnnnnnnnnnnnnnnnnnnnnnnnnnnnnnnnnnnnnnnnnnnnnnnnnnnnnnnnnnnnnnnnnnnnnnnnnnnnnnnnnnnnnnnnnnnnnnnnnnnnnnnnnnnnnnnnnnnnnnnnnnnnnnnnnnnnnnnnnnnnnnnnnnnnnnnnnnnnnnnnnnnnnnnnnnnnnnnnnnnnnnnnnnnnnnnnnnnnnnnnnnnnnnnnnnnnnnnnnnnnnnnnnnnnnnnnnnnnnnnnnnnnnnnnnnnnnnnnnnnnnnnnnnnnnnnnnnnnnnnnnnnnnnnnnnnnnnnnnnnnnnnnnnnnnnnnnnnnnnnnnnnnnnnnnnnnnnnnnnnnnnnnnnnnnnnnnnnnnnnnnnnnnnnnnnnnnnnnnnnnnnnnnnnnnnnnnnnnnnnnnnnnnnnnnnnnnnnnnnnnnnnnnnnnnnnnnnnnnnnnnnttgtggggtggggggaggggggagggatagcattaggaagcaatacctaatgctgaatgacgagttaatgggtgcagcacaccagcctggcacatgtatacatatgtaactaactggcacattgtgcacatgtaccttaaaacttaaaatataataataatttaaaaaaaaaagagagaaaaaaaagaaaataacatttcagttaacctcaaagatacaatactgaagataaaatcctctgggttttttgagagatttcttaaggagatcaagaagttaaattaagtagcactggcagagtatgcatcttcaggtagtacaagattatagaaccttctatctacccatgtggtctctccctgtgtatccctatgtgtatctagttaaagagaaagcagtagaacttagcaggtaaggggactcgaggtcagtttgggttgaaagtctaagtaggtcagaatccaaggtctatcatttactagttaagtggccttggacaggtaactattctctctgaggctgtctcttcatccgtaaaacaggaacaataacacctaccaataatgattgctgtgagaattaaatgaaatatttgtacagtgctaagcagagtgtctgacacatagtccagagctaaatcactggtagttaagctatcagtcttgtgaatgtgatatagccactggtcaaatcctatagcacagtttattatacaggacacttaactgctgccctgtataaaatttatttgtaagaattttgtcttaggcagggtgcggtggctcatgactataatcccagcactttgggaggccaaggagggcagatcacttgagctcaggagtgtgagaccagcctgggcaacatggcgaaaccccatttctacaaaggaaaaaaaaggaattttctctcattataacaattagaacaacaattattgaacacactatgcaccaggcactgttctacgtgattcaattaagtgtattaactcatttaatttcataacagccatgaggtgggggggagggagatgcatattttattggcaaggaaaccgaggcccaaggtcacatagttaataagtgctagaggcaggatttaaaacttaggtgtctgggtggcatatgttattctactaacactgctgcctctctgactgtaacctacttaaaaacagacattggccaggtgcggtggctcacgcctgtaatcccaacactttgggaggctgaggcaggcagatcacaaggtcaggagttcaaaaccagccaggccaagatggtgaaaccccgtatctactaaaaatacaaaaattagtcgggcgtggtggcgggtgcctgtaatcccagctacttgggaggttgaggcaggagaatcacttaaacccgggaggcggaggttgcagtgagccgaggtcacgccactgcactctagcctgggcaacggagcaagactccatctcaaaaaaaaaaaaaaaagcagacatcatttatatctttaacacatactgctgcacaaaattatgtatcaagtatttcatatggcagtgaactgtgtttctatctctctatctgtccctcagtgctttaggcataacacattctcaaaagctacttgaatagatgaaaaccaggacagggctctaacaggccctacacaatcctcatcttcctcccccgctcatctcatcccctacctcattccccctgacgcatttactctatccacggcagctttcttgctgtcctgaactaccatgtgcattgcttatgctctgggggctcattcggttcatagtcatttgttgaacacctactatgtgacagtcatgaaaaggcactggaaaatacaaggtaaaaaactagtgtgaaaacagttgaatccgaagacagtctgtggtttactgaatattagtgtaccaatgttaatttctaagctgtgataaatgtacgatggttatgtaaagtgttaacattaagggaagctgggtggagggtaaagaagaactttctatgtatttttacaactcttctaaatactttaaattgtttcaaaatcaaacatttttattttaaacaacatacagttcctaccttcaggaactcaaattctagaggaaaaggtgggcgtgtaaataaatgagtccaccaaagtgagtgataacttccaggtcagaagtcatgttcgggacaggatgtgaaggggaaggaggcaggccggctgtggccaaccctgttatccagtacaaccgtttaacctcctaaagcctcagtttacttctctgcaaaatgggaactagggaacagacacgggtccttgcagggctggtgggagatctgcaaaccgaagtcaccatgggaccgcgcatgctatcaacagccaggccgagcagcacctgccgccctcccagtgacccacctggaactccagcccgtagatcactggtgcatcgtcctccatgctgcggggaagcgacccgaccccggccactcacacgctaaggacctcgctacggccggcgcgtctccacctcgcgggcgtgtatccagcgcacattcattcactccccgcagcaaacgactccaaactggaagtctttctggcccagaacagcttccgtagtggccacttcctatttttcggatgtgtcatcaatctgttcctcaccagcgaccaatggcagcggcgctggcttgtgcgcatggccacttgggctcacatccgggctctcagcgcggggactcctggaggtgagaacccggcccagaggaaataagttggtgggcggagcgggccgcggaggccggctgtgggtggaggccggctccgagcgcaggccgtcgggagcaagcggcgattagccttagctagccatcgcatctaagaatcgctcacgccgtagttgggcgccgccatgtattgtcatttgtatgtacttggcgttcctgagcgctgggccagcgcttcacacgcactgccataaggagcttcatccaaccctatgaataagctgttacacttccattttaccgatgagacgctgcaaagttgagtaacacagtcgcagcgctcattggtccattgggtagccaggatgggcacctgagctgactccctgaggttcggcccaaggtgccctaagtcagggccatgcctaatgcatttctgcaggtgcccagcactgtgtggcaaagaaagcactaccaaggatggggttatgaaagccggcaccgcaccactggtggtcctggactgcatatgcctccgaatgggagtcggaagggaaggccctggggttcctagaggtctccaaagactaaagacttgtggtggagagactgcccctctttcgcatcctgctcaaagtgcctgccctggccttgggccagcagaaatggcatcgcaaggactccaaaatacatcatagctgaaccacgccgctagcctggttccaccggggcttccaggaccacgcacctttcctccatttctgtgattagctttcccctctaccctttattgatctccgtgacggaaatggttgggtctcgttttgctcagttgggcaaggcgcgtggtattgagttaaggctggatgagtatctgttgagtggatgaaattttagagattacatgagaaatcaaatgagcaggccgggcgcggtggctcacgcttgtaaccccagcattttgggaggctgaggagggtggatcacaaggtcagttcgagacctgcctggccaacacagtgaaaccccgtctctactaaaaatacgaaaattagcccggcatggtggcacgcgcctgtaatcccagctactcgggaggctgaggcaggagaatcgcttgaacccgggaggcggaggttgcagtgaaccgagatcgcgccactgcactccagcctgggcgacagagccagagtcggtcaaaaaaaaagaaaagaaaagaaagaaatcaagtaagcaaaaacaagaaagaaagaaatcaagtaagcaatggcccagacatgagaatcatcctattcaaccactctgtttgccgatattaacttgcggagctaagagggccttcatacttcgggattaaacccacccatctatcactgatatctttatcattaattttattatacaagtactgcaggtgcatggtaagaaacttacaaaatacagataaacacaaagacaaatccatagaaacactgatttctaggatatgctggtcaataaaaatagcctaagcgactccctttcacccgccccatctgccacaggcttgcctattgcctctgagtgacagaatcaggctaggtggagtggagtctccgttcccatttccaagtacagggtccgctcccctcaactaccggctcctggttgcctgtgcgcgttcacacctagggctccaggccccgcccacagcagacgaaccggaaacgaaccccatttccggcctgggggcagggcctcgggttcctgcatcgggcctgagcagaactaggcgcgccgcggcccggcacgcgcaggcgtacagagctgcccgggggtgccagttcctctccgattcccggcttctgtcaccttcctcacggaccttggtcacggccgcaggtgaccccttagcccagctccagtgggcgggtggcaggtgaggatcagggcttcggcagtccagaggggatgggaccgtgtagcgccacctcggggagggagcacactggctttggcctcagcccggaggaaccttctctgggaccgatgctagagtgggcgtggggtccgggcgcggggtcgcctgccacccaagggcgtgtgtgctccgcgggccttgtgccaggctccacgtcgccgcggcccttgctctccacgtctgcagagggctggaagcgtctctgcagcccgcggagtttgcgggaaggggaagctgctgcgaagcgtgtgggaaactacccgctggcgcgcgcccaggcgtccccgagacccccagttccaggcttggtgccagccaggcccccagcaagccccttaacttcccttagacttaattcaccctcccgcggaaagaggttactaatgacctgccctgccaaactcagcattgtgaggctgcaatgcagtgtaaaagcatttgagtcactgtgtaaacgtccgctgttgctacacatactaattgtagagtatatttactgtgaagacggaaaaagcgtttattcaacagaaagcgttagggtcaaagatgtgttttaacgtgtcattttttcactcttcactacgaaacagtgtagccccaaggaaaaattttcttggacctacggtttgtactttttaatggctacttgaagatatggtgtctttggattcagtcactgttcgcaaattcagaagatagtggcggataatgagccagtcccgtcttgggattggggtgggagagggacaggggaaaagcaaatgaaatattacacagtgttactcattcagttcttacattttgtgatatctgatgggatcttcttcacagttactaaactgggtgttgccactctgctttatcattaaaatgataattactatgcttgtgtctgtgcagctcttcacactttaaaagatgcctatgcaggggtgccactatttaatcctctttattctgatgtaccatctaaaagatcaagattttcagaggttacttcacttggtcgggaagctaagactcaacacagttattgagacactgccttcagagctctttctgcccacccctgcctggcaaccttgcaagaggagctgagaggtgaccagcacaaagaaaagagtattggcagaaaacgctgtgtgggtagcctgtcaccatcaggtactgtcagtgtgatgttaggcaaatcacttggccttctctgctgtatgatggaggtaataataatgcttcaaaagtttaggatgagtattaaataataaggtaaaatgcttgatctgtagtgagtgttcattacatggagacttctgttaatacgtgccacctagatttccactacacaccctcgtgcccttatggaaggaaattttacatgactgcaatttggtaaaagatatgtttacagagtgtctgtgtccaggaaatgaacctgagaaaccaagttttaaatgttgttaggaactttttatttctcaaatacagaattacttaaatttaatatttaaaaaaattttaaacaattaattaatcacattcttgtgcaaagccctcaactggacaaggagaaagtcagatttctttgctgcactgtgatgtaaagcttctgtaagcttatgtaagcttaaaatcctatttatagtttaataaaaataaagccaatgataggagggagtaaagatttctatcacgtacaaatcaagaacagatacttgtgtttttccatttttaattatgaactataaagactacccgtaacacacatgtgagatttaaagatcaagtcaacccagtcttccattaccagcataagatggggaccatttcccagtgcgttgaaacttccgtgtgtccctccccagtcaagctctcctgccatcaccttccacccctccctcactaaagtggctgttactatatcctggcttttctttgtagtttgaccaaatatgtttgtgttcctaacacagaaaaagtgtttggattcaacacttttgtttaatttacatgtttttgaatatacagagtcatgctgtttatttttctactcattctttgtgcaaaattgtatttgtgagatccaaacataatttatatgttagatatggaagagttcactgattttcaccactattttaatattttatgtcctagtataccacagtctacttatttacttattattgtgtctacaggcagtgtttatttccactttttttttttttttttttttgagatggagtcttattctgccgccaggctggagtgcagtggcacgatcttggctcactgcaacctccgcctcctgggttcaagtgattctgctgcctcagcctcccaagtagctgagactacaggcgcccgccaccatgcctggctaattttttgtattttaatagagacagcatttcactatgttagccggtatggtcttgatctcctgacctcgtggtccgcctgcctcggcctcccaaagtgctaggattacagatgtgagccaccacgcccagcctactttttcttttaggactttagaagaaaggtattttgatgtgttatttatgaaattcagcatcatagcttacactgctcatgtacaggaattcctccatgataggtatctagcagtggaattgctaggtcctaggtactacgaccacatatttattgtctcaaccaagactcctttaagagtgaaaggagacacttaatgattttactgaggcgaagcacatggctcacgcctgtaatctcagcactttgggaggccaaggcaggaggatcacttgagctcagaagtttgagaccagcctggccaacatattgagtccccatctctacaaaaaatacaaaaatagctgagtgtggtggtgcacacctgtagtcccagctactccagaggctgaggcaggaggatgggcttgagcccagaagatcgaggctgcagtaagccatcatcgtcccattgcactcccgccagggtgacagagccagactatgtctcataaaataataatactaataaaataatagaaataacttaaaccatgggtgaaaaattgaattgttctgggaaaaatcaagatgtatagttatcaaagtgataagataatgtgctttttaaactttactagataataccaagtggtttctcaacatggatgttcaaaggtatacctctttcagctctgttgcttatttttctaatggatcatttagtgtgcttttattaatttgtagggattctttatgtattcttcgtgttaatcctttctcagttacatttgtttgtttcactttttttaggtttttaatgatagaactttccattttaatatagcagatgtatccattttccctttatggtttgtactgattatgcctagtttaagaggctttgcctactctgaaaatatattctcttatattttcttttgaaagttttgaagttttgcctttcacagttaatttttgatcccccacccccgccccgcccgagacggagtctttctctgtcacccaggctggaatgtcgtgcctcaatcttggctcactacaacctctgcctcctgggttcaagcgattctcctgcctcagcctcccgagtagcagagtagctgggattacaggtgcccgccaccacacctggctaatttttgtatttttagtagagacggggttttaccatgtcggccaggctcatcttgaactcctgacctcgtgatacgcccgccccggcctccgaaagtgctgggattacaggcgtgagccaccgcacccggccttcacagttaagtttttaacgtccctgagattgatactgtgtctgtggtgagacaagattccaagtttattttttcccagctgcatgatttgtctacacatcactcaaggaaaatcgtctcttcctttgatgtgtgctacatattcccttgtgatagttcagtcttgttttttttttttttttttgagatgaagtttcgctgctgttgcccaggctggagcacagtggtgcgatctcggctcactgcaacctccgcctcctgggttcaagtgattttcctgcctcagtatcccaagtagctgggattacaggcgccctccaccacacctggctaatttttgtatatttagtagagacagtgtttcaccatgttgaccaggctggtcttgaacttctgacctcaggtgatccaccctcctcggcctcccaaattgctaggattacaggcctgaaccaccgtgcctggcccaatatttcagtctttataccatagatttttgatgtattctacataaataatcatacacgaagaatgaaggtttgtatttttttcttttcagtttttattgtagcttttagttatttttcttgccttaatcctgcccgaggactccagtattaggcagcataaaaatgttgaagaggacatctttatcttttttctacttttaaagagaatgctttaaacgtttcactgttaatttgaggtttcctttaggtttttggtagatacctttgattgcattaaggaagttactttctgttgctagtttgctgacaggttttatcttgagcagatgctgaattttattagatactttcttgtgcatctattgagatagtcatgtacttttatttaatctatcgcattaaaccaacagtacatttctgggattacctgagtttggtagaaaataaatacattgctgattcagttagctaatatttcaagatttttgcatgtgtgttcatgagtgagatgatagcttcccttttagtatggccttgtcaaattttggtctcaaggttatattagccttataaagtgaattgggtcatgtgtcttttttcttctctgcaagaatttttgtactgtaggaattatctgtacggaatctttggtagaattcactggtaaaccctctggaccctatattttctttgtaggaagacttaactactggttatactttttttatggttatagaactatctcgtcatatatacatggttattactagtgtctgctttgcatttgaaccttacattggaataagattagagtaaggaaacccttgaagtgaagaagctattttgctacaaattatatgtccattctcacaaaatcttatgtatataatttatatagatgtagctttataatatatgtatgtcttcccattcataaaagcatcatctaaatcacgttttatatcatttttatttgagcattcctcttgattttctagagaagaaaccctcagatccttacttacaagcattttcctgcatctagattttatttgtgtgaaagcaaaagtgatcatccttgccctaaattattagggctttttattactttggtatttacttaagaataaaatttatttttttattttcttctcttctcaaaagtggtttgcaggtattaatgaaaattttggacattcccattttatcagttctccttaatttacaatttataaagtttttaagctttataatttagaagcattttaccttaatttttattattttggtggtttttctaggcgatgttttttgttattatatctctgataaacagatttccctaaatcttacaggtttaaagcagcttcatcttcacaatagtaagaattgtttctttaaaaagtttcttcacaaaggcaataaaacttttaaaatctgtgagattgaatcagaattagctttagaacctagaattttgttagggctgagggtagatgagacggagggaagatccctttctctcatcattagcttatatcgaaatcaattcttatttctaaaataaaatacgcagaccacgctagtgccttcaagtcctgctgggagacttcagagggggcactgcctcatgctgcctgtttgctccttgtgcccggcctctatccctgcacaggaaggacccgaaggagcagccttaccatgcacagggggctccccctttggggttctagggcaatttgttcttcgggctcccggtgaaacatggcaggaaaaaaaacgttttactccttttcattggattttttattcatttatacttaacaattattggatgaatgtataagggaattagtagctgaccaggctgaaccggaaacttcttcaaaatgtataacttggattatgtactttaaaataatgttttgggaaggctgactcattgggaatactatgatggaagtgttgacagtgagaaaagggtagtcttatctagagatcagctaagtgtcattttttaagtaaaaaaggtacgtgttgttttattctgaaaaaaatcccttatcttttatcatagtctcttagatttccttaacttgaatttgttcactatgagagtaaaactacataaagtaaaagtttttcaagaaaaagaacaaatacttttttacagtttgagctctttgtctcattctttggctggtcctggtttccccactcactagcggtgtgatttcggcttacatagcctcccaaggcctcagtgtcctcatctgcgaaacgaagacagtgatagcagctgtctcgaggggtgttctgagaatcacacaggcatatgtatatatagccaggggcatagtatgtgcggataaatgttagctagttgtgttgtcagcttcagccatcagtgcttagtgagtgtgctgttttcttactgtttaaatttttcatgtcattcgcactgtatcagatttccagagtcaggcagataatatgagctggggcgtggggcgggggtaggggcggacggcatggggaagtcaagagactattacaaattgaagagtcttgggagggcttcatggaagaggagggacttagctgactctcagaatgaagtagtgtttatatggctggaacctcacacctactggaatggctactatgaaataaaaacaaaataacaagtgttggcaaggatgtgaattccaaggcttgtgcactgttggtgggaatgacaaacggttcagccactatgaaaaacagttttttggtgcctcaaaaaaattaaaaatagaattaccatataatccagcagttccttctaggtatttacccaaaatgattgaaagcagggtctcaaagagctgtttgtacagccacgttcattgcagcagcatccacaatagctaaaagatgggagcaacccacgtgttcaacaacagatagctggataaacaaaatgtagtgtatgcataccatggaatatttttcatccataaaaaggaaggaaactctgaccaagctgtagcataaatagcccttgaggactttatactgagtaaaatcagccagtcacaggaagacagttatcgggtgattccacttattttatagtagaatggtggatgctctaggcgggggagatgggtatacgggggaatgtttaatggggatggaattttagttttgcaagataaaaagtgttctggagattggttgcacagaaatgtagatgtacttaacactactgaacttaaggtggtcaattttatgtgtattttaccataatcaaaagcacatggataagaagctggagaaatggaagtctgcgtcatttgaatctataagcaatactcatttttcggttgaggtgaatgaagatcacgctcaggggccttctctctgtctttgctttcagggtcatggaggacgctggcggcggcgaggagaccccggccccggaggccccgcacccccctcagctcgcgcctccggaggagcaggggttgctcttccaggaggaaaccatcgatcttggcggagatgagtttggatccgaagagaacgagaccgcatcggaaggctcgagtcctctcgcggacaagctgaacgaacacatgatggagagcgtcctcatctctgactcccccaacagcgagggcgacgcgggcgacctgggccgagtgcgggacgaagctgagcccggaggggaaggcgacccaggcccggagcccgcgggcaccccgagtcccagcggcgaggccgacggcgactgtgcccccgaggacgcggcacccagtagcggaggggccccgaggcaggacgcggcccgcgaggtcccaggcagcgaagctgcgcgcccggagcaggagcctcccgttgcggagccggtcccggtgtgcaccatcttcagccagcgcgcgcccccagcctccggggacggcttcgagccgcagatggtgaagtcgcccagcttcggtggcgccagcgaggcctcggccaggacaccgccccaggtcgtgcagcccagccccagcctcagcacgttcttcggagacacggccgccagccactccttggcctcggacttcttcgactccttcactacctccgccttcatttccgtcagcaatcccggcgcgggctccccggcccccgccagcccgcctcccctcgctgtgcccgggaccgaggggcgccccgaacccgtggccatgcgagggccccaggcagctgcgcccccggcgtcgccagagcctttcgcgcacatccaggcagtgtttgcagggagtgacgacccctttgccaccgccctgagcatgggcgagatggaccggaggaacgacgcctggcttcccggcgaggctacgcgtggagtcctgcgggccgtggccacccagcagcgcggcgccgtgttcgtggacaaggagaacctcaccatgccgggcctcaggttcgacaacatccaggtgagcccgggtctcccacctccgcagcccgtgcctcctctctgcgtctgtgagatacgcacagtgcccctcaagggatggagaaggagaaggccttgttttcagtaattcctaacatcccattgtgagcgcctgtgttcctctgtccctgggtaattagggatctgttggtttccccaacagaacatatttaatggactgctactcagagaggtagaaataaataccaccaaggcagacagttctaccgtaattctctcagtcagttctccatgtcctgtaatccatttgacatttgaactccagttaataataaatccatttctttctttaaaatatggaaaaatatattcctgtaacatataatgtgcccgatgtagaatttttataggttgaataagaaaaatacgcgtgacccaaaaagtaacaaatcacagaaatatataaatgttaagctaaatggtaacatacaaatgttcgatctcactactaatgaaagacaattgatgcagggtttttttcggtgccgctttgccagctggagacctccgtggtcggcgatgcccctgcccaggcctctctcggcccaggttcgcccactaggcctgccgggccgcacctggcttgcgctttggcatatcccgtggcctcggtgactgtgctctcagcccccagcaggtgggttgtgcgagcaactgagtgtaggggtccgggggctgctccaaccgccagcataggagcaggctccacacggggcttgtagctggaccaggcgtgtggcaagtgactcccacagtggactcctgcgtccaggcgaggggaacaccgtggcgcccgaagagcaacgcccgcgaccccgaagcccgagaggggatgttacagcgtgcacacagctcttttcgacccgcatctgctgccggactaacgggcatcttaacggctctaaacgggcgcattaacagaccactgcttcccgttgagtggggcagccgaagggggtgggggatggagggttacagtgttattgctgtcttggtacctgcactccgcggagtcctgagttcttgtcctgcctccaagaagaacgagattatgccgacaaccagagtgtgaggagggcggacgagttttattgagcacaaaacagctctcagcagagaggggaggcgagggtggtcccccaccgaaagtcaggtggtgtctctcccagtgtggctggctcaggggcttttttgggctcagaatggaggggtgcatgctgattgtgagtatgcaaaaaagaaggctaaaacaaagtcaccactcaaaggtgggcacgacagtggaaaaaaccagttggggaagggtaggtatatgtaaaataggtgaagaggggtaatcaatcagaggaaagtgctccacatgggacgaaaggttctcagtcccttacgtgggtttatccgggacttgcagctaggctttaaactgtcttcagttccagtcaggtttcaccggggaccgcccctgtctgcctaggatttgtctgcctcctgctgccatcacactcgagtcatttccgtttccatttatcaatcatgatctactgtttgttgaagtgtgggaaaatagcctctctaaggcagcccagatgggaccaaaatcagtacaaacatatttaagtaaattttaaaatgcgtatcaaatgtgcatattctttgacccagaaattccactcttaggaatgtattgtgaggacataatcatacttctatacatataccagctgttgagatgtctatcagggtggtttgtaattgcaaagaatctgaaataatctaaaagcccgttattaggaggcttgaatacatttgactcacctcatctttgcaatggaatatttatgtaagtttttaaaatgatgccaggggttagggggaggaagggatgaacaggtggaacatagaggattttaaggcaatgaaactattccgtgtgatactttaatgctgggtatatgttgttatttattttaccaaacccatggaaagtgctacaccaagagtctaccctaatgtaagctgtagactttgggtgacaatgatgtgtccatgtagattcatcagttgtaataggtggaccactctggcgaggtgcgttgatcatggggaagactgtgtgtgtagggggacaggcaatatatggaagatctctatacccgcttaatttcgcagcaaacctaaaagtcctctaagtaataaaatcttcctctgatcattggtgaataataatataaataaattgtaaaatctatttttaaaaagatataaaacagaatatttaatgaggttcatctcatactgttaaatttgaaaatcaggacagaagatagcatgtagcatgcatagtatgataaaatttttataaatatatgtatacatatgtatcagattaaatcatatgcatgtcagttttagtttattgcaaccaaattgtgggacaggattagtagtttccatatggcactgtacatgacggggcgccccacctcccagttactggcctcagatcctgtgcgtgtctgtcttcctgaaactgaaagaaggacctacagccccctttagtgcaaccacttacccactcctgaacccacttacccactccactctcactcctgaacacaaataggtaagccaataagccaatcgtatgactgtgactattgctattgaattgatagatggctgagacctaggagtggtgaattctccaggaaaagaaaagtgacatactagagaaatgaagccaattaattttttcagataactgaagtgtaagcctatagacatccgtattttgggtgttttacaggcagtctttccagaatgttcattgactaatttactaatattcatttactatacttattgtgtgtttactcttgaccaggcattggtctaggcatccttctctaccctcttaggcagaatatactgagcataatttaacctttgcaggatctttttaatgaataccaattccggactctgatgtcaggggtatttggatgtgtgggattggatttatttgtcactgaattcttacctgtactcccactccctggtcttgtctctgtatcctgtccccccaagatggctttcatgttctgctccatgtttcttcccttctctctcggggtctttgtcctctctgctgtaaaattcctttaacatctgtgggtctggcctttagcactttctttcaaaccctctgttgcttgccttgccgtttgcttctccctctgactgtaactcagaggaaatctgaaggttgccacaggaaagacttaacctattgcttcccaactgggtgctgcagtccaacggtcttaggtacatttggaaagggggagaggtgtttcactttggttgacaaaagggctggggtgagcatatgacatttagtgagtagggctaagagtactcagtaccttgcagcgagctcaaagctttcaaggaatggaaaacacctgttcctcaaaaaagcttaaaggtctctggtcctgtccagtttctccttttatgatgaggaaacagatccgaatgacttgtgtgttcaccagcaagcctgccatgtcccaggcatcctctctcctcctgacacaaaggaaggtgtaatgcctacccgccagcccagaccaggacagacggcctagacaagggaaggcagacctgcaaatggataatttcagtgtcctgtggctcagtagagatccaggcagagtcccatgggcgtgtttaccctagataatgcagccacaacactgcagagccagtgccagaacacaggtcctctttgccttagttctggcctctttgtcttatgttgtatttctccctaccatagaaaatgactaattgtatttctctcagaaggatctctgtttaagtcaaagaactagaaacagcactaattatcagggaaatgcaaatcaaaatcacaatgagatatcatggctgttaaccgaaaactctggagacagcaagagttggtgagggtgtggagaaagggacccttgtgcactgttggtgggaatgtaaattaatacagccattatggaaaacatggaggtgcccgaaaaagttaaaaatggagctaccatatgatctaacagtcccccattctgggtatgtatccaaaggaattgaaatcgggatctcagagagatgcctgcgctccatgctcactgcagaattatacagtagcccagatagggaatcaacctaagtgcctatcgacaggtgagaggacagagaaaatttggtatgtagtggctcacgcccataatcccaacttctcaggaggctgaggcaggaggctcacttgagccatggtgttcaaagctgcaatgagctatgatggcaccactgcactccagcatggataacagagtaagacctgtctctttttaaaaaaaaaaatgtttttaaagaaaagaaaatatacacaatggaattctatttagtccttaaaaaacaaggggaaaccttgccatttgtgactatatgcatgcacctggtggacattaggttaagtgaaataagccagacacaaaatgatgaataccacgtgatctcatttacatgtggaatctacagaagtcagactcatagaagctggggcctgggggtgtgaggggcatggggagatgttactcaaagggtacagagcttcatttatgcaagaagaaggaatgctggggatggaatgtacatttaacatggtgactatagttagtaatactgcgttgtttacttgaaatttgatgagagcagattttaagtgtcctcaccaccctcacacatacacacacacacacagtaactatgggtagtgacggttgtgttaattatttcgactttggaattcagtacacaatgtctacttataacaaatgatcatgtataccttgaatatatataatttgtatttgtcaactaaatattctaaaatttaaaaatatgccttttctatttacccacatttaaaaaaaaaaaaaagaactggaaatcaaatggcttaactttagtgttccataaagagtgagtagctcagtcttctccagggtcccagaagttgcctgatacgtagacatatccctgatcagtatgtgagcttaggaagagccttgaattagaagaattggtttcaaattgttggtttgccaataacctgtgtaacctaagggaattcattgaacatctgtggctctattttcttctctgtaaaatgaaaggttttggtaagtctgtcagttacgctgtaggttcagctgcattaacaaagaaagccaaaggtatggtggctggaataggatacatgtttatttccaggtggtagaacactttggagatatgtgggccagcactgtggattgactctaccttcctcaaccaagtccaggaagctttttcccattgctgtcttccagccatctggaagagggagaggctggagagctctgcagtattccttttatgatacgtcatctggaagacagtgtgtccactcacatcccactacctagggtttagtcacttggccacaccaagatgcaaggaaggctgaaaatagtctttaggtaggcgaccatgtgctcaggcaaaaccaaagttctgttactagaagaaggggagggccgggcatggtggctcacacctgtaatcccagcactttgggagtccgaggtgggtggatcatgaggtcaggagatcgagaccaccctggctaacacggtgaaaccccatctctactaaaaatacaaaaaacagccggacgtggtggtgcacgcctgtagtcccagctacttgcgaggctgaggcaggagaatcacgtgaacccaggaagcagaggttgcagtgagctgagattgcaccattgcattccagcctgcgcaacagagcagcactttgtctgaggttaaaaaaaaaaaggggggggagatcagagattggtggatggctgagagtctcctccagtgagtccttccagcaccaaaagtcttgaatctggaatccataattactgccagccttgagcctttgctgataactgaattcccactgctgcgtatgtaagaattatccagcttgtaagtaggttcgaaacccattttctagtaaattatgttataaatcgtaggggagtttttagaataaaccacaaagggctctctaggtggaacttattataaagagataatgttgtatattctgtctctcacacacacactcacactctatcctgttattagtaatttagcaaaataatgttgggaaagcatatttgagtacagtcttttttgtggatatattttcgtttctcttgggtaaaaacttaatagtatactttctggggcttacgataaatgtgcatttagctctataagaaatagaacagtttccaaagtgggcacagtatttcatgtttccgtcagcagcgtatgagagttccaattattttgtatccatggtatagtcaacttttttcgatttttgcatttctctgatgactgaggttatatagactacttgatacaaaggatctcatgtattaatcctttgatatgtagacggtttgtatatctttatagagcatctcttcaaacgttttctccatctttcaaacttcggatgtttgtcttattgttactgtgttttaagaattctgtaaatatcctggttggaaatgagctatcatacacaatagatgtgttgcaattttttttttttttactattctatgtcttgtttttgcaatttcttaggtgtcttttgaagggcagaaattttaattttggggtgcaggtatactagctacagattctcgcagcttttattagtttcaaaattattacttttttttttttttttttttgagacagaatcttgctctgtcgcccaggctggagtacagtttcacaatcacagctcactgcaacctccgcctcccaggtttaagtgattctcatgcctcaccctccagagtagctgggactacaggcacgcaccaccacgcccagctaatttttttttttttttcttgagacacagtctcactctgtcactcaggctggagtgcagtggcacaatctcagctcactccaacctccacctcccaggctcaagcaattcccctgcctcagcctcctgagtagctgggattataggcatgtgccacgacacccagctaatttttgtaattttagtagacacgtggttttgccatgttggtcaggctggtctcaatctcctgacatcaagtgatctgctcacctcagcttcccaaagtgctggaatgacaggagtgagccaccacgcctggctagttcttgtatttttagtagagacagggcttcaccacattggccaggctggtcttgaactcatgacctcaagtgatctgcccaccttggcctcccaaagtgctgggattacaggcatgagccaccatgcccagcctcatcttcgttattaaagtttatttttgccaaatatacaacatatttacagtatgtagaattctaggttgacaggtttttttttttttctttttagaccttgtaagatgccatcccactgtcttttgacttgcatagtttctgatgagaagtctgcagtaattcttatcctcgctcctctgtacctaattgtatatttttcctctgggtgcttttatgatttatccctggtttttcagcagtttggttctgatgtactttcacatgggatttatgtttattttgctcggcattcattggctgttttggatctgagactttatcatttttgtcaatttggggaaatttggggtcattatttcttcaggtattttctgtgttttttctctctcctacttctggaaactccaggtatacctactgcttcatattgccacagaagctactgaggatctgtttttgtgtttttattttgcagtctttctctctgtggttaagtttagaatttctactgctgtccttaagttcacttatcttttcttcagactttttagtttgcagctaatcctattcagtgacttttccatgttttttacctctggaatttttatttggttctttttcatatcatttttcttttatcattttcaagctttactttaaactcttgagaacatttataagaggcaccttaaagttgtcttctgagctgggtgtggtggcatgtgcccatagtcacagctactcaggaggctgaggcaggagaatcactggagcccaggagtgtgaggccagtctgggcaacataggcctctttaaagaaaaaaaaaggaaagaaagaaaagaaaagaaaagttcttatctgaaagttccattatctatgtaatatctgcatctatttttatgtactttttctcttagttacgggacacatgttttacatgtctagtaattttttattagaaggtggacattgtggatttcaggttgtgtgtctagctttttcatcttcctttgaaaagacttgccctttattctgacaagcaagtaacttatttacagatttagtttcatgtttgtttttagactttttagaatgactttagagcagtagcttctacttttgggtgacctttctgaagtctgtactgaattccccttctgttcagtgagagcactaaacatggcagacccacagtcagcacccttcagccctgtgtgagctctgggcttgccagctcacaggactctgtccatggcagacccacactcaacaccccacagccctgtgtgagctctgggcttgccagctcacagcacctcatcctttcctgccttcagagctgcactctctgcacatacagctgagtgtcagcagtaaactcaagggctcccacacaaaccctttctctgcttagctccctcctttctagatctctggatataagaattatccagtttgtaagtatgttccaaaaccattttctagtaaattatgttataaattgtagctgggtttttagaataaaccacaaaggattatgtaggtggaacttattatatagagataatgtatattctttctgacacatacactctcacactttctctgtctcccattgttgttaataatttagcaaaataagaatgttgggaaagcatatttgagtacagtctcaagctcatcagcccacccgccttaacctccttgatgtcccaaaccctgcttgggattctcctcctgcaatgtggtccaaaaagtgccattgggttcaagagttcaactcatgttttccttctgttgggtcacagtcctttgctgtgtctgaagacagttgttagatttcttctgagcaatgttgcagttgttcacatcaagacagtccagtcccagttaccctgaaatggacagaagcaaattactgctgctttttattcattcatcagttggtggacatttgggctgtttctaccttttggctgttgtgagtaatgctactgtgaacattcacacacaggcgtttgtgtctatgtgttctcagtgatctgggatgtatagctaggtgtggacttgctggattctgtggtaactctgttcaacattttgaggccccgccagacagttttctaaaatggctattccatgttgactccccaccaatgatgtggtgtgtgagggttccagttgctccacatccttgagtttgggtttgggttttaattgttgtggtttttttgttcaggtggtctcatttttccctggagtaagcaaacactggatcagaggatagaccctgccaggataaacaggcacctttctgcattggcgatgtggcagaaagctcagcgtgttctgtgccaggtgcaggggctgctgcctttcagcagctctaccccgtgagcatttgtgtctttgggcttcccagacagtaaggcccatacgctttcagtccactgctctggcttctgttttgtctttcaccatcaaaatcaagaagggactactgagactattcccccattgcaggaaaggcagccaggccctaaccgcctgtcagccgtgagaacagccacttgctcctccataaatgcacctgaccaggagaatggggtggcgacatcacgatgagtcccagattgtgatatattcatgtgtctccttcgtgttccctgaaccttgccctggataaagtagaccctcactgaatggcttgctggtctgaaggaatcattggttctagctggattccatcccaggtgtagtagcacagctctctagaaagccctgggggaagttccctccccctcccacctcccctgcacagtaacggctagaggagatgcagtacaagcgtctccacctccctgcgctgtcaccaccttcagttagccacacagcaagggcgaggtttgtcctaagacgcttgtcacatccttggccctctgttggtgggatatttgatagtcatgcatatgctagtatctcaggaacttgctgtggtagctaaaatattaactaacagagaattttaaggacaagagattttcacagcatggtctcattgataatgttgtggggatggaggagttgaattggccctccgtccctggcattacaatttgattttgctctttacccagctcgctgcccccctggctgagatgctctttgtctgagacgagttgcatttttgcagagctttatggggccctgtgtctgaactcttttattttgccttttaattattgctgctagatcagttagctgattttgtggatctggtatttgaagtacttcaccttatgctctgaaagcagaaattatacaactgctgcccctaggtcttttcctcaatgtgagaaaacgtgaggctggcctctgcgagcaccaggtttagcacccagggaagagacagacctatgacctggagccacccagccccttctgccgcaggctgttgatctctcccggtagaagggaggcagcagagcagagaagcaatgtcagcagcttttctgattctcttgctctcatggtctagattctgttcttcttttaagtgtcactattttgaaagatagcaaaagattgaaataaccttgcttcttaggagaaacaacttctatgcttttctttcccccgctccccccgccaccgccccgccgccaaaaaaaaagggtaggagaacaataggaagagatctgagccagcggtgaagtccaggcagggggcacgcaggcttctctgcaccctcagtcactgcgtgctcccagtggcccgcctgcagcatgagcatcagcttctctgtggctgggaggcagctttgtgctgagatggagagatcttggctttctccaccccccatcttggggttgtcctagtttgagtctctcttctgctcacccgagagactgcagggactttgtgctgtgtccctgtcagcagctgctgcgggccagacgcccagagcacggtgtcagggaagatccagccagctccggctgcttgctgtctccaggcatttcagggacctcagagccactgcttcctcctcccaggatgctcactgtctctggcatttcagggacctcagagccactgcttcctcctcccaggatactcactgtctctggcgtttcagggacctcagagccactgcttcctcctcccaggatactcactgtctctggcgtttcagggacctcagcgctgcttccctttccccctgggctgctctatccccccagctgcccctgcctcaggtgtttcagggacctcagtgctgctgccccttcccaggtgcctttcctcagtcagcagcacccccagaaaggagagagatggtccagggctgtgtcctggtcccagctgtgtgtgagaggcgtctcctgccgcccgtggagagcatcgtgtcctgtgagcagcctttacttaccctggactctccctcggcctgcggtgcagccaccgaaacagcactgaggcctgtggactgtgacagttttctctgcactgttgggatgactagtttgtccccatacaacagacttggtaacttcaggcccttccctggggcccctgaactgtgccgactcccgagggtcatgaaggctggctcgcccagcatctgggcttgacactagctgtgagattgctccctgctcagggcaggtcattggcacatctcttctgtccccaggccacacaaaagcacctgttctccctccccttgcccttctgtgtcttccctttaaagcaagtggcatgcttcagattccacgtccagtgttcttcagcaccgtctaaagatcgttctaatcagaggagtcaggtcaggagtagaaacggtcccatgcagaggcaactggattcttccctggcttgcagcatgaagtgcgcccagcagctcctggagcaaggcctggctcagcgaggctaccgaggacctgctgtgaaagggggtctcagttttcctttggcttggctggtgacctcagcactgaagagagggccattggtaatttaacttctttagccctagccctccaggctttcctggaggtccaggcaagcatggaggcattgatgagatttgggaagactattcaggcctgcctgcaccagcgcgaggctggccactgtgggtgcagcccctggtccccagcagtgtcaccttcatgctcctgggcctccctaggcccctcacctgaggcctctctgctggcttggctttgcctctcactacaagcctggtagtaggcggtaggacttaccgtttcctcttcagaataaagaacatgctttctgatcagtggtgaataaagatataatttttaaaataaaaagaataaagagcaattctaaaattatgcattttattaacgattgtgctaatttagcttctggttaattgaagttttacgatactataaccgttacttttacctccacaagccagtggagaaaaaagaaattgtgtttagttatgggttctggttagctgagtttagttgacattttattgtcttgacatatttttcttctattcttcccagggagatgcagttaaagacttgatgcttcgctttctgggtgaaaaagctgcagcaaagagacaagtcctaaatgccgactcagtggaacaatcttttgttggattgaaacagctaatcgtaagtgacaatgtgtttgatttcagtgttgttttgtgataagtcctgcctgccttcataatattttctctagaagtcaattattttgaatattattcaaagctcttgcacataagtagaattttgttggagtagatgccagtcctgtgcaccaaaaagcatcatattaatacatggatacttttaagcctaattagttaaaaagccattattggaaatgatcaaattactcaaagcagtgcatactttgattgagtttgcttcatcatatataatagagataaatgatttgtgttcattttttaaatatattgcattttctgcattttgtgtagaaagtttattattgaatgggtgaatttctgaacatttttaagctttgtcatgaattctataagtaggtttttaaaattcatggctgggcgcagtggctcacacctgtaatcccagcactttgggaggccaaggcgggcagatcacaaggtcaggagttcaagaccagcctggccaacatggtgaaccccatctctactaaaaatacaaaaattagctgggcatggtggtgcgttcctgtaatcccagatactcaggaggctgaggcaggagaatcgcttgaactgggacccgggaggtggaggttgcagtgagccgagatcacaccactgccactccagcctcggctacagagcgagactccgtctcaaaaaaataaaaataaaaaaacattagtactggatcaccattgctgtacaggttgatttgtttccaatgaatttataatcttaaagacagctgtaattgcgttgggtagcttttctagattaaggagaagatattggaagtttgtcgcgtatgtttccttcaggaatcctatggtagccatggggtaagtactctgaaatgagagccccatctcacaccgaatctcagctccccagtgttgtctccttagggggctgtggaattgctctgctagctcatccacacggttgcctagagtggacttagcaaagccatgctcccatgcctgcatgcagtcaagttagtgggcacactttcttgaaggggtttggagagtgaggtccttgattttgggaataagtcccaccggctgtctgaaactcatgttgaaatgcgcccttatcctgactgtatttcagcggcacatggtccagacactctccatttgggtgaacaatctggaggacatgtattcacctttcaactttcaaaaaagagaatggaatttcctaatttacttatttttctaatagttccccatcttgtttttctcaattgttactaattcttctgcaccgggcttcagatttcaccaatttttttttttttttttttgagatggagtttcactcttgttgcccaggctggagtgcaatggcgtgatctcagctcactgcaacctccacctcccgggttcaagtgattctcctgcctcagcttcccgagtagctgggattacaggcgtgcaccaccacacccggctaattttttgtatttttagtagagacagggtttcaccatggccaggctggtcttgaactcctgacctcaggtgatccgcctgcctcaccctcccagagtgctgggattataggcgtgagccaccgcacccgaccagatttcacctattttaagcaaactttagttcctaaagatataatagttgagaagtttagaaatttctggaggattaaactttgcagcccattgaaatgacaggtgaaggttagcctgtgaactaaaacagaaaatgagaatgttttaaagtttattttggagtagcgcgtggctcagtcccagctcagaggcaactgtcttttgtgtgaaaacagtaatatgtaaatcacttacttgcaagaagactacagtgaagttcagaagaaaataatcccagttccttttttgttacatcacctctgcctctgtatttgaaagtgaggtatagcctgtccccattctgccagaaatgactgatgtttgtgaggctgaaatcctgagccaggagaggagtgatttcttgatctttaacaggagcatttaacaaagtaacaaaattttttccttaattgactagttctcttgaattcagacaaatccttattatgtgtggtcttgtgacttctgtgacactttagaagctttcctgggttcagtatggattggggactgcctgctacgctgaccgggccacctggaacccctttgcctggggcctggctcccggctgtgatgacccagatcgcggttgtgtgagggcctttccgaagcatgggtgggggctgtactctgctgtgaggtcgcgcagggacatcgtgccctgggttcctggattttctagtccctctcttctgattttaaacttctctttgactttctactttctagtgttctattgtcagcagatctcttgcttcctaagagagcctaaaggaaaaaatatagaatcctccccattttactcaaaagtcagtttcttatattcttctcgatcttgatttttaacttcctttgatccctgatctttttcccaaaaaaatctttttttggagttttgcccaaaaagcctgtttttgagaaagtaccgaacattggcaaagcagccttagttacttggattttatcctgacttcattatatgcatgaactgggaggtgacatgtcatcagtgtcaataacaaatgctgtaacttgggggagacagagccaacctacaaaaattaaaaatctgtaataaacaccgtgacagtcaggaagcgtgtcttgttcaccagtgcatctgaggacccagcacagtcaggcacagaatgggtacacggcgtcttcttgagtaaataaagggatgagggaatgaatagataagagaacccccagtcggtaagctactcttttgataaagaagtagcgtcagaatgttgggtttaaagaaatagagaaggagctcatacaaaaggatagagtggggggcggttacgggggagggggcgcaaagagtgaggagatgaaaccacaagaagattagtctggagaaagatggaacatttcttcctctgcaatgacagaaaaggaaaggaaggatttgaaaggaatgaaaatcgaatccagcacattttcaaactgtgattctgagaaccctcgggttccagggagggaccttggggtgactgggcatggcctgcggaggtgacttggtagggccagtgtcaggcagagcatttcagcagggtctactttatgtagaagtctctcttgagatgtctttttttgggggggtggggggaaaggaggatgaattttactatttaaaaatttgaaaaactaacatagtccaaaatgcccgctttgtagattagaacactaagatctacaaaggtgtagaggttggccccaaacaaatgtccttgctcctgttaccagtaccatccctactgccccatgtcccttacacagtccgcacagcccagcaaaaagcacagttgctggtgttggttttgctcattgactacctcccaccaaatgacttagtatttctgaaccgtcggatctacacaccgtgggaattacgcttttcaatacagcttctaggactggattgtatccaggggtaggatttcccatgagaagaccttatatctgatgggattcaaacaaacaagttctcacttgtgtttcttagtgtattcattgagcaaacacatattaagcctcttctctttccagcaataacaataaaggttgctaagctagtgctcttgctccgtgaagttctgccttcttaaccatttatgggatttactcagatttagaagtgctattctattatttttaatttacttattgctgacttgaagctcatacactatttttaaaagaagtatatattccagattcacaaatttattgtaactcttatgattcttcatcagtgtcttcagacacagacacaaattcagctgcactcctaacccatggcagtgaagtttctcttttctctcctcatgccctgaatccacttcccatagggaagctgcttgtactacatcttgaataccagttcccacaaccctgcttctgtaactggcgggaatcccgagagctccagcatgaatccctcaggcctcttgccccagagcaaagttcccagctgttccctgacttgcagagactgaaggacccttccagactcagagaagccaaaccttccccagagacgcttccctctcctccttcctctgcaccacgctccccaagctgtggaactgtcactcacatggtcacgcaacatacacacacaggtctgtactcattaactcggagtaagcgcaaaaacccaggcagagaccctctcctaaaatagaagcaggaaattatcttaggtgtaggtgtttgctgtctgaatccttctggtagcctgtgaaccactggaaactatgctccccaaattgcctttcttccccacgttctttaccgtatttacagaagcgtgtcctcaaaaaggtaaacaagcatcccttgcttaccttcacacatcacaccaagtttaaatgtgagtcaatgtcagtcgaatgcttctttgagtttcttttaccaaagtgattctgtaattatttctatgattagaaagctttggagaggagagagatggagatactcttttttaaaggggaaaaaacagctaatttgtaagtatctgtatcctttataatttgctaatgcagttacggatctccagggtggccatttccctggcccatgctctgttcccaagggtgtgggcgtggccccttggtttggccatggggaagctgctgtgatgtatcctcttgaggcaggaactgaactggcagcatgacagggctttataataatgggtttaaaaatcacacacaaagccatgcatgttaattataattaattttttctacaggctattttttaccctctttgatcgttcctgttattaataaatatatacaatggtttgatgtgtttcatacgttggaaatacttgagaccatcagaaattttattaacaggcctaacaagggagcttacgtaaggtgaaaaatgtatttatgaaaggatctttaccttgccctggtattttaattctagtgtgtcctaaaataattcgtgttgtctttaaggcagccaggaaagggtttttgaattatttccctaagttatgtcagagtttcctaagattgtaatttacagggaaatggatgtcacagcctgggagaaggacgtgttaatcactttaatggtatcatatgtagaggtaataattccctttgagtcttagatggagaaaagttatgtacatgccattagttacttgagtgatttttattagactatttttctcatcatttggaaattgtgtaatgcctacgttcagtttttcaaatagaccctgtatcgtactcctagcaaaaaaacgtaaaagtagtttttatctaaaatctttatctcatatcagactaacttcattattagaattttacatgtcatgtacagtaattatgagattttcataagatttctttcacaaagtttaaagttttatgtggtatactttagattctgattttaaaaatagtttctttgcttcatatttctgacatctatcattgaaaatagaggaggggggaggccgaggcgggcagatcacgaggtcaggagatcgagaccatcctggctaacacggtgaaaccccatctctactaaaaatacaaaaaattagccgggcgtggtggcgggtgcctgtagtcccagctacccgggaggctgaggcaggagaatggtctgggaggcagagcttgcagtgagccaagatcacgccactgcactccagcctgggcgacagagcaagactccgtttcaaaaaaagaaaaaaaagaaaaagaannnnnnnnnnnnnnnnnnnnnnnnnnnnnnnnnnnnnnnnnnnnnnnnnnnnnnnnnnnnnnnnnnnnnnnnnnnnnnnnnnnnnnnnnnnnnnnnnnnnnnnnnnnnnnnnnnnnnnnnnnnnnnnnnnnnnnnnnnnnnnnnnnnnnnnnnnnnnnnnnnnnnnnnnnnnnnnnnnnnnnnnnnnnnnnnnnnnnnnnnnnnnnnnnnnnnnnnnnnnnnnnnnnnnnnnnnnnnnnnnnnnnnnnnnnnnnnnnnnnnnnnnnnnnnnnnnnnnnnnnnnnnnnnnnnnnnnnnnnnnnnnnnnnnnnnnnnnnnnnnnnnnnnnnnnnnnnnnnnnnnnnnnnnnnnnnnnnnnnnnnnnnnnnnnnnnnnnnnnnnnnnnnnnnnnnnnnnnnnnnnnnnnnnnnnnnnnnnnnnnnnnnnnnnnnnnnnnnnnnnnnnnnnnnnnnnnnnnnnnnnnnnnnnnnnnnnnnnnnnnnnnnnnnnnnnnnnnnnnnnnnnnnnnnnnnnnnnnnnnnnnnnnnnnnnnnnnnnnnnnnnnnnnnnnnnnnnnnnnnnnnnnnnnnnnnnnnnnnnnnnnnnnnnnnnnnnnnnnnnnnnnnnnnnnnnnnnnnnnnnnnnnnnnnnnnnnnnnnnnnnnnnnnnnnnnnnnnnnnnnnnnnnnnnnnnnnnnnnnnnnnnnnnnnnnnnnnnnnnnnnnnnnnnnnnnnnnnnnnnnnnnnnnnnnnnnnnnnnnnnnnnnnnnnnnnnnnnnnnnnnnnnnnnnnnnnnnnnnnnnnnnnnnnnnnnnnnnnnnnnnnnnnnnnnnnnnnnnnnnnnnnnnnnnnnnnnnnnnnnnnnnnnnnnnnnnnnnnnnnnnnnnnnnnnnnnnnnnnnnnnnnnnnnnnnnnnnnnnnnnnnnnnnnnnnnnnnnnnnnnnnnnnnnnnnnnnnnnnnnnnnnnnnnnnnnnnnnnnnnnnnnnnnnnnnnnnnnnnnnnnnnnnnnnnnnnnnnnnnnnnnnnnnnnnnnnnnnnnnnnnnnnnnnnnnnnnnnnnnnnnnnnnnnnnnnnnnnnnnnnnnnnnnnnnnnnnnnnnnnnnnnnnnnnnnnnnnnnnnnnnnnnnnnnnnnnnnnnnnnnnnnnnnnnnnnnnnnnnnnnnnnnnnnnnnnnnnnnnnnnnnnnnnnnnnnnnnnnnnnnnnnnnnnnnnnnnnnnnnnnnnnnnnnnnnnnnnnnnnnnnnnnnnnnnnnnnnnnnnnnnnnnnnnnnnnnnnnnnnnnnnnnnnnnnnnnnnnnnnnnnnnnnnnnnnnnnnnnnnnnnnnnnnnnnnnnnnnnnnnnnnnnnnnnnnnnnnnnnnnnnnnnnnnnnnnnnnnnnnnnnnnnnnnnnnnnnnnnnnnnnnnnnnnnnnnnnnnnnnnnnnnnnnnnnnnnnnnnnnnnnnnnnnnnnnnnnnnnnnnnnnnnnnnnnnnnnnnnnnnnnnnnnnnnnnnnnnnnnnnnnnnnnnnnnnnnnnnnnnnnnnnnnnnnnnnnnnnnnnnnnnnnnnnnnnnnnnnnnnnnnnnnnnnnnnnnnncagaaaaaatccccatttgggaaagtataaattgtaaatggtaaataatgtgttttcttctctttttttcctttaatgtttttctaaatgattatacaaagaaaatcatctggctgggcacaatggctcatgcctgcaatcccaacacttttgggaggctgaggtaggagaatcagttgagtctaggagttcaagatcagcccgagcaatatagtgagacccctttatctacagataatttaaaaattagcctgatgtggtggcacgcacctgtagtcccagctactcgggaagctgaggtgggaggattgccagagcccaggccgtggaggctgcagtgagccctgatcgcaccactgcactccagactgggcaacaaagcaagactttgtctttaaaaaaaaaaaaaaaaaaaaaaaaaaaaggggaagaaatgaaaaaatcctgtttctattccctctactgatgcatctgactctcacaccacatctaaattagagatgaaggggctctctcagtcacgtctgccctgaattgcagtgggggctctccccagctgaggtgtgaggctgggtctgggccttgcccctttgctccccactccgtgtcccccagcaggtctgccagcgccgagccctctgcgcctccacctgggagatgcaggtggaaagggctgcccagactctctctgccacgtgctcttttgtgttatcgtctcagggaattgggttgttctgactcctagaaaattggctctcgggttggtgtaagtttgtgtagatatgactgcatgtcatttatagaccaatcgatattaaccagtaaattgctcactctaatagtgcacacttaatcaatagcagcaattatccaagtaaatctttcatattcagtcatctgtgggaaaattatattgggagaaaccgtaacaagagcataaacatttctgctttctattttcagtcaggaaagaagccactttttaaaagatttacatttcccaaagaaatgaataattaagatggtaggcatttgctttatttttaatagttgtgatctagtgtgagacatagaaaataagtcttagaatatgaaatcatggcaaaagctgaaggctttttatatgatatgttttactatttttaatcatttatggagtactttatgtttgcaaagcccttgcaaataattttattacacatgtaaatgtttgattggtggcgagtatctatacatagtgggtataaaatgagatggaagcctttactgtaaaatatgtcttacttgtttaaaaaatacgtaagtatccataatcagatcttcccgttgatatgtttttgtgcccacacaaattcaaattgcctttgaggtccatcaaatagataacaaattgagggccaggcgtggtggctcatgcctgtaatcccagcactttgggaggacgaggcaggcagatcacgaggtcaagagatcaagaccatccaggccaacatggtgaaaccccgtctctagtaaaaatacaaaaattagctgggcgtggtggtgcacgcctgtagtcccagctactcgggaggctgaggcaggagaatggcttgaacccaggaggcggaggttgcagtgagccaagatcacgccactgcacttcagcctggccacagagcgagactccatctcaaaaacaaataaaatgaaataaaaaacaaattgagttcactgggctttgtgtggcatcacagaattgaacatcaggagattccatatctactgtatcaaaatccttttgtttttcagaaaaacccaaaactttgcttatgctttagctgctatacttagtagtaacttacaccttccatacttgttgtgaaaatgctgtattatttcaaccagcctgaatttggttcctgcatgtcaagcactgttctaggtacagagactgagggcgtcactgtgtggagagaagtgacatgcacacggttgatttctgacaggccaggacatcaaagcgctgtctgcatgagtgctgatccatcattattttttcattcacaaaactcttttttcctcccttcacaaatagcaagttcctgtatctaaaagagaaaagaaaaactgaaaaaaagattgcttatataaccactgtccttttacattttagtgtatgtgttatacgtatgtgtgtgcatatctatactatacatagtgtgcatgtatgaagatggagatacatgtttgtgtatatatgcttaggcacaaaattcatatgcttctatcaatttgtgtctttttattatgtattatatatttagcatttccccatataaaagggtctttaaaaacattttaatagccacataatctgaagttattgtaaataatcttaagatgaactgtcttatacagaattctacatatgtgattgtttctttaggataagtcttaggaggagaattctgaagtcaaaggctgttcataaatactccccattgtcgttcagaaggtcattccaggttatgttttccacagcacctgagtgcactggctgtagcatctccttgcctatcctgacttgtatctttttttaaaaaaattctaatttttttaggctaacaatgacatttgctttttatttgttttgctagtgaagatcaactcactagtaaattataatttgcatttctttgattactagtgtggttaattaagcattagtttattcttgtactgtcttcttgtagtgctatgaatttactgtctgttccacaatttttttgcatgccaagtgccacactaaagaaatgcttttagaaattaaaaagcaatgcattagatgcggccactgccccaaggagctaaaggagaaataggaattaagaataggaaggtttcaccatgagcaggaaaggcaccattaagatcaggtttgaggctggacatggtggctcacacctgtaatcccagcactttgggaggccgaggcaggtggatcacctgaggtcaggagttttaagaccagcctggccaacatggtgaaaccccatatccactaaaaatacaaaaattagccgggtgtggtggtgggcgcctgtaatcccagtactcaggaggctgaggcgggcgaattgcttgaacccaggtggctgaggttgcagtgagccaagatcgcgccaccgcactccagcctgggtgacaacagcaaaactccgtctcaaaaaacaaacaaaaagatcaggtttgaggttggtttgagggtgctcatcttgcaatgagcaagtgcaggtgagctctgactggagcaggggcgtgtgagggctcggcgacacagagcggccagctacaccttcatctagaacggattcatgtcatctccaactccagggtggccagctgaagactgggccatcatctgttccgaatcattgatatgattgtgtttcctgtgacctgttctgttgttttagacctggtcagcacactcacaacttcaatgaaattaggaatacctttcacacagagctaggcacataagttgataagtacaacctgaaaaggcccaacttagccgtgagtggacataaataggagttgtattaccacaaaagtaaggaaaatatgccatgtacagatatcttgttcatttattatacaaaataaatggtggtctttgctcccaaagacccttccagaagaaaacagttgaatacttttagtgcagaaggacaactccgggttactggtagaacttaaaaactattatttacagtttctcttcttaactgtttataacttttgttcataaaaactggcagtttcctttgtctaaccactgcataccctctttctttaggactctggtttttctgttgctttttgtactgcttccatttgtgatagtcaaaaaagttgactccttggactcaaggaaatatggtcttggtttcttttatcctgggacagctagtcatagtagtggcaaaggattatctcattatcttcattactcattgtcatcccagagaaccttgatgaagagcttttagataaaacatgaatagagtgtcattcggccagttccgtagcaccagcagctcttgttgaatggtgttcggttagtgaacagttttatagtttctgaaaaggtgacacacgttcaatatcaaattaacaaataatgtgtacgtgagtgtgattgaatatcatgcagccattataaatcatgtcccaagaacatatttgaggatataagaaagttttgagtaaatgatacaagacactgtatgtttttttaaaaaaagacgacaaggatgcatctgagaatactgtgccattgtccacagttgactttcttttttcacttcatacttactgtttgtactattccacagtgtgcacagggatgaggtggtagatggggggtgttagctaactctgttgaagcagctaacctgcctgacaatactgtaagtgtttaaaaggtgtcagtatgcgtaatcatctcaccagcacccgccaccttagcctgctgtttctgctgtatcctctcagttagcttacgatagtacccatttgccctggccagaatccaggacttttacctcctaaataattcatatgagtgtttgtctcctccaccctgcccctcccctcctgtgctagttcaggccttgtttccttgtgccttgttcactaagccagctcagtatcctttttattcacgtaataccccccaaagaattagaaaactaggtacccctcacacatttttaagctatctaaaatgttttatcataaatttaaatggtttcaaaggatataattaatttttagcacatagtatgttgcatatgtgatttaattatatttccatcagcagtaggactgcagattcagctcattcagtttgggaaatgtgacccacttggcagccagtacccatcgtaaccagtcactcaaaccaggcacgtgtgatctcagaagaaatctcacttcgtcgtgtgatccagataagcatggcagtggggtcctggcagcagtcactccactctggatttagtccttagaattcattctctcccttcaaagccccccgggttcttgtcctcccccctgccgccaccctggggtctgccactctggggtccagcctctagctccagctccagctcagcctcacccccaccatccccctgaccccatcccccagctgtccccgctgtgcagtgccttgaacgtgctctgccgtgtgtcggcccgtttcctgaatcctcaggcatcagtgcctcacagagctgtgtgccagcagtgtcctcacagagctgtcaagcgtgtccatgccgtgccgcttgtgcctctgccccgcgagggacaccattccccgtcgttgacgtgcattcctcttgttcatcgtgcgagactccccacccctgtgccaccggtctcagtgtctcccacactggagtgtccgtatttcataaacacacgtatgtgtgcatgtatgtatttcttatggacatcacgtacgttggcccttcatatctacaggttccgcatccacagattccaccacccgcagttgggaaacacagtgaggtatgcacagcaacctttcagctgtggttggttgaatccacgcgtgtggaacctgcagatacggaggaccaaccaaggacttgagcagtcatggatttggtatcccaggagtcctggaaccggtccccggcagatagagggtctgctgcttgtgtttatgcatgtgtgtgtatgtacagacagtccccaacctccgtggtttgacttaagatttttcaactttatgatggtgcaaaagcgctcccctttcggtgggaactgtgctgtgagcacccacgtgccattctgtttctcactcgcagtgaattcaagaaatgacgtgaaatgtccaacactttataaagcaggccttgtgttggctgattttcccaactgcaggctaatgtaagtgttgtgagcatgtttaaggtaggctaggctatgctgtgacattcagtaggttagatggtgcattcacttcttttcttttcttttcttttcttttcttttgagacagagtttggctctgtggcccaggctggagtgcagtggtgcgatctccgctcactgcaacctctctcccaggtttaagtgattctcctgcctcagcctcccaagtagctgggattacaggtgctcaccaccacatctggctaagttttgtatttttggtggaactggaatttcaccatgttggccaggctgctctccaactcctgatcccaggtgatccacccagctcagcctcccacagtgctggggttacagaagtgagccatcgtgcctggcctgcattcacttcttttcttttttttttttttgaggcagagtctcgctctgttgcccaggctggagtacagtggtgcgatctcagctcactgcaagctccaccttgcaggttcacaccattctcctgcctcagcctcccaagtagctgggactgcaggcgcccaccaccacgcctggctaattttttgtatttttagtagaggcggggtttcaccgtgttagccaggatggtctcgatctcctgacctcatgatccgcccccctcagcctcccaaagtgctgggattacaggcgtgagccaccacgcctggcccacttactttcatctcaagatatttctaacttactgtgggtatggatggagcatctgtgtctgtcttgatgcactggtagccatttgttctgtatgactgtccctcatgccaaattcatctttgtactcctgttgcctgacttaggacatacctcctcttaggtgcttagtagatgcttcttaagtgagggagtgactgggtgcttctgttaatatcagtatgaacagagagctaagcctgccccgccagcccagcctgccttaagggctgtcttgtaacagcttcgcctcacaggcattcgcaccatgacttccacaggtaggtttctttattccttccccgaaacatcaggggcattctgtgagctttcctgtgtgtccgcaggggcagttctgtccttggaagctgagagcagaagcactgcagggcccccaggccacttcctaggcacacccctaccccttcactgtgccctccccctaccccttcactgtgccctccccctgccccttcactgccctccccctgccccttcactgtgccctccccctgccccttcactgtgccctcccctgccccttcactatgccctccccctgccccttcactgtgccctacccctgccccttcactgtgccctccccctgccccttcactgtgccctccccctgccccttcactgtgccctgctgggcagccttcctgggctgcagggcagatgctctgtggtacctgctcccgctcctctcaggaaggccttcctctccctctctgggtcacctctccctggcacatgcttctcccaaacctgcatctccagtgtcttctctcctcagctacaacctgccatctgcaggtttaccaggcacttttcacgtgactgttccaccatcttgtcattttttatatcttctgtcattttgtaaaacccagctcatctgcctgctgcgtctccatgtccggcctgccctgggtgggtagagacaggttcgcgctgtccctcagatttccacgttagtgttttattggttagtttgtttctgggtctctctcaccctctagggagcagccacggctccccccaccgcccccgctgcctgctgctctcctcctgccgggccaggtgatgcagcgtctgaccacgtgcagtctttagactgccctagtcggtctgtacgctgcagctggattcgttttccaaacattttatttcaaaatacatttctctgtttagaagcacccagttgcccctcttgcctggaactgaaatctcaccattgtgacctgatgttggaaacttgccctggcttctgggacctggccctcttcgtcggccttgtgtccccccgagcctagcacagtgcctggttcacagcaggcagtcagtaaatggccactgagtgaatgaatgaggaaatgcagattccgccaacatttactcatcgaacttctttgttcttctttccatgagaattaaaaccttaagtttctcatttttaaaaatggtcattggccgggcgtgatggctcacgcctgtaatctcagcactttgggaggccgaggcaggcagatcaccggaggtcaggagctcgagaccagcctggccaacatggcgaaaccccatctctactaaaaatacaaactttagccgggtgtggtggcgggcgcctgtagtcccagctactcaggaggttgaggcaagagaatcacttgaacccaggaggcggagattgcagcgagtcgagattgtgccaccgcactccagcctgggcaatagagactctgtctcaaaaaaaaaaaaaaaaaaaaaaaaacattgtcatagtggcaggcacagtggctaatgcctgtaatcccataatcccagcactctgggaggctgaggtgagtagatcacttcagcccaaaagttcaagacaagcctgggcaacatgggaaaaccatatctctacaaatactcgcctgcttctgccactctgcaccatcaatataaataataactaattcacaataatcagtcatgaaagaataaaatggaaaacatgccaaatgcaggcccctgctttgttatcactgcatgccatacacataaagttctctgtcacgtgactacaggagcatctccattcctgtgnnnnnnnnnnnnnnnnnnnnnnnnnnnnnnnnnnnnnnnnnnnnnnnnnnnnnnnnnnnnnnnnnnnnnnnnnnnnnnnnnnnnnnnnnnnnnnnnnnnnnnnnnnnnnnnnnnnnnnnnnnnnnnnnnnnnnnnnnnnnnnnnnnnnnntagctgagaatggctgaggagtgatgacctggtagtcctcctcccagacctttcccttcacccagtgactccgggatctgcaggggtggcccagccagtcccggggcctctccgttccccagctcttgattctcccaggactacttctggctcttgtgggggccacttggagccctgtgatcaccttgtgacgcttggagccttgtgatcacccacaccctatacagctccagtgggacatctgccatttcctgagtgccctctcccgccagccagctggtcactgtggcatccacacccacatgtggttcttctgccttcctgcacaccgtggctcaccaatctgcttgctgactctgcctcagcacctcgttacttcacttccttctccatctagcgtggtttccatgatccacatctcacacgtgcctttcccaaatcccaaaatgcctgttccttcattcttccactgcacatatctcagatacctgcgcttttgacaggttcagcctccagcttcctctgcaaggacacccagccgctgaggctgcaggaggaattcccacgtccaagcatctgcagtgatgcttggcagcatcgggtgcatcatcagcactgcagggccttcccgtcaggttgctccggtctctcccactgcccttttagaccatctctacctctctcacgcctcccacccctccccttcctcctcacttttaaagacgagtgaccttccccctgctttggagccaaaacagaattctggtagcacctcacgtccctagtcctggacacactcctgctgaggtcagcgggcagactgtcctccccgcagatggccctcggcccacatgccctgacgcctggaaccctgagccatgggtcatcctttcttcctaatgtgtcatcagcccttctccagctacagcctcctcctctgcgtttttacacactcaagtacttggttaaacacagacactgagggtctcaccttctgcggccgctgtctgcctttcctcccctgacagtctggtagtgctgacttccctagaggttcctatagctgcccatctctctgcttccctatccttagtttccacagattttttttttttttttttgtaagacagggtcttactctgtcaccgggctggagtgcagtgtcatgacttcaggtcactgcaacctcagcctcctgggctcagatgatcctcccaccacagcctcccaagtagctgggactacagatgcatgccaccacacacagctaatttttgttttatagagacagggtttcaccatgttgcccttcttgagctcctgagctcaagcagtctgcctgactcagcctgccagtgtgctaggattacaggtgtgagccaccgcgcccggcctttccccaaatcttattctcgtctgattccagtccaaccagctctcaacaaagctgctaatggctttgtctggaacctgccggatgttgagttcctctgcaggctgcctcctggagacatctgctcttgaacccaggaggcggagattgcagcaagtcgagatcgtgccactgcactccagcctgggcaatagagagtctgtctcaaaaaaaaaaaaaaaaaaattgtcatagtggcaggcacagtggctcatgcctgtaatcccagcactctgggaggccgaggtgagtagatcacttcagcccagaagttcaagacaagcctgggcaacatgggaaaaccatatctctacaaatactcgcctgcttctgccactctgcaccatcaatataaataataactaattcacaataatcagtcatgaaagaataaaatggaaaacatgccaaatgcaggcccctgctttgttatcactgcatgccatacacataaagttctctgtcaacgtgactacaggagcatctccattcctgtgcctcgtcctcaggtatcagtcgcaagccactcgcgggctgaagtcagcccacagtcctccttgaagtcaacagaaatgaactactgagccacgaggggcctagacctgggatccgccagcgttttctgtaaaagaccatagaataaacattgtagacttcctggccatacagtatctgtccagctcctcagctctgctgtgaatgcccagctcttccatggtagcacagaaccttatcaccgtgcaggtgcacacgaggctgggctctgggttcctgtgagctctgcctaccaactcaggcagtagggggtggggggcgtccaaaggatgtgcacagattgccagcaccaggcccagctgctggaacatcctcatagctttactcacatctacacggacgccttaagttcaccccatcagtgcagggagacaggggccttcaaatgtgatgacacgacactgctgtggcctgtgctcttggaagcctgcaaaggccagcacacccgaccctcctctgcctcacctcctgtgccaccccatcctcacctgcttccccagcctctcctcatccacacctgctcggcccctcctccaccgcctccctccggcccgctggtccttactgcatcccctcgggccctgcaccctgccctctgctccctgtgccccccatgcctgctctcgccttgttttgcacacattctgtcctcttctagggtctccgccccctccccttccctgattaactcctgcctgtcctcactgtaggtcatgtcctgagggaagagggccccagcctttctagcaggaaaggccagagccttaggcctagggaaccaggaagggagcagttattagttgcccctggatacagaatctgcctagatgcatatatagaactggttcagacttggcacaatctctttccctctcactctttcacatttgcaattcaaagagaatatacagagccatttgtattatataaagtgattattgcattgaatttagactagagaaggcatttggagatcgttttagtaaattatcgtaaccaatctaaaaatacttctgaactgtcaaccagaacacagaaatcctgtattacttgctgtagtctggacagtttaggggaacgtggcaccgatctcatcttcaccgtcgatcagtggttctctgacttggtccagtggccgcacaccagctagtgaagaaaaccacagactccaactgcactgtgtacgctctggtgtcctcatttccaaaaaaaaaaaaaaaaaaatctacaagatagaatttaagaaatctcatttgagttgccctgctaatatttgcagctcgctggtgggtgccgtggaggccagtactcaccgtcaggctgtggcaggtacagtgaaaggaaaaactccatgagagaacggtggaaagttcacctgagagtgaaacgcatgccagttagagtggctgaaaaatagcatggacaacaccaagtgccacgggacgtgcagccgtgggacccctcactgctagggaaggcaagatggcgcggccacttaggaagacagcttggcggcctcctacaacactaaacatactcttaggtacaacccagcaatccagttactgcattacgctcctggatatttcacccagttatgccgaatgcttatatccacacaagaatctgcccaaagatgttgataccagctttatccatagttgccaaaaactagaggcaaccaagnnnnnnnnnnnnnnnnnnnnnnnnnnnnnnnnnnnnnnnnnnnnnnnnnnnnnnnnnnnnnnnnnnnnnnnnnnnnnnnnnnnnnnnnnctggcctgtctgaagctcaaggcccagcacccgttcctttccttacacatagagtttcactaggcacgcacacgctgactctggattgatgaagaaacagtttgggaatttttaacagcatcgttcacatttttaatgcctgcctcctgcctggcactgtgctcagcactttcatgtatcttctttaattgtcacatctgtgaggtgggacagatgacctcagctctgtaaactcagccattgctgagcctgcagtgtgagtgtgaggccacatgtcagaaccccggaagacacaagccccactctcctgccttcaacacagccccccacaccgccgctgtggctggaattggagcaggtcgttagctcctgcctgaggaagcccaaataaaggactgcagaacaactgtagtgcaaagctgagactcattgccctcctaggcgtttcatgagcaggtcctgagttctctgtgtcccggcgtggagtgcaggaggcgtggaaagggagtagtgcgtgtgtgagttagtatacagaagaagtgtgtggcaggctctaccacacgtttttaaaatatgtaaactcctaaacttcttgtcagagaagcgcttggcatgcacacaaaatcatttagctaatcttgagaaacatattgtttaattgtctgtctcccttgctagatcataccactaatgagtgctcgttcactaacctccccgccagccttgcagtctctgtcaggcaggaggtacttaaagcatgtttattgactggctgcagaaatgaggacatctaccgtattcaaagatagtgcccgttacattgagaaaagacagagtgagcatccacttttagcttcttaaaaggtttaaacattctgatcttattttcccattcatttgcctaatggctgtcctttctgtattgcacaagggcaaagataaacacaagagtctgtacgaatcagccagtgtgtcagtaccagccagcctttccatgttgaagccgtaacgttaagtgatgtgaaagtatactgtgcattgccacacgggcctggaacatgttgtgttcacccagttcattgattttttcatattgataaattaaaattatgaacatataaagccagttattttagagtcatatgcaaatcttacagatacaaataaatatgtccaacacatagcataaaatttccttattgattttaaattgacagaaatcttaagataatcttgctaaaaaggaaaccagtcatatagattgagagatgtgcggagctttccaataaaaagcctcttcccgatgttctatcggttgttgaattgtaatgtttttatgatttgatcggcttgaactgtacctcacgcttggctctcttattgcctaattacacgtgcagcgttgacaaatggcatgcccctccgtgccgtcagcacactgaccttgtcaccattactaacggctggctggcgctgcttccagcaaggtgagcagctgtggccagtggctatgcgtttgggtcatggattccaccatgccttgcatgtgtgtttggtcacatgttctgccgtgtcttgcagagctgcagaaactggagggcagcagtggacctgtgcggacgtctcctcacagcccacggccagggctacggcaagagcgggctgctcaccagccacacgacagattcactgcaggtgagaacacctttcaggtgctggagtttaacctggcttatcacagtctggggacatggacaggaccatggcctttcatgccaataacaaaaagtatgttttcatatcctgcttctttctctcctaattatattgtatatactatactggggcactggaattctcacttcggcccgtcaggacgcctgtgcgccccagaagcacgctcacaagtgcccacactcagtctcatggtggaaccggcatggctttgggtcagcaggtgggttcgcctcacgactggcagtagcaactggcctgtgcggggctctggggcgtgtctgggcccggtaggaaacagtgacaggagcagttggttctgtccaccccaaggacggagggtccatgtgccatttgctcctcgtggtatatcacttgctctgaaatttaaaaaaaaagaaaaaagaaaagggaatgcacaaaatagacttgtgaacaaaaggaaactcatctgagaagaaggaacagctgcaaacgttgatacattcttacctttccctggggagttttttaactgttcttctagcttacatgggaatcccccgggactaaacagatcaccagatccttcagaactgtgatgagcttttgaaaggagcagctctggggagccctgacagcttagctatttccagcaggctccttctccttctttctcttcccccaagagccgacaagaagagccgctctagctttaaatgtactttcccccatcacctctccatccattggtttgccaaatcttaggctgttttcctatcatttctctccaacccaccaccacccacagttcgagctctcattgcagtgttgctttggcctcttttatgaacttagttcaagtttctttattcacattcattccataaactacctccaaaaaagcacacttttgatcatctcactttcctgctggaaaactgtgcccggcgcagtggcgcattgactgtagtcccagctactggggagactgaggcaggaagatcacttgggcctggggcttctgggccgtagtgcactttgttgatcaggtgttggcactagctcaacaccaatatggtgacctccctagagccaggaaccaccaggctgcctaaagagggtgaaccaccctcctttccaactaggtctgaaacggagctagtcaagagctggatagtttcccattggctaccatgtgaaatttcatcttctcgtgttgtatgcaaaccctcagaccatgacaggctatgtgtacactatggaatggttaaatcaagctaaatcgcatgcattgcctcgcatgcctttgtgtgtgtgtgtgtgtgtgtgtgtgtgtgtgtaatgagaacactgaaaatctgtcttagcaatttttagtatacattgtaactgtgtcaccacgtctacaatagatctcttgagcttattccttgcgtcactggattttgtttcctttgactaacatctctcaaacctcccctgcccggccctcctccccacccccagccccggcacccgccatctactctgcttctgtgagttcagtgttttcagattccatgtgtaagtgaggtcacacggtgtttgtctttctgtgcctggcttgtttgtctaacgtcatgtcccctaggctcatccacagcacaaacgacgggatttcctccatgaaagctgagtggtattccactgtgcgtcatgccacgttcctttatccgttcatccttcagcggacacttagtgaaattcattcttctcatcagtaaagtcagatccaattaggtcatttctaaggtacccttttaatcctaagtctctggctctgcagctgtctaatgcaaattcccaccattttcctgaatgtacccctgagagcacactgtgctctctcgtatgttgtgttttgtccactctgtacctttgtccttacgttccctgaaccagcagacccttccttagcctgtggccccttgaaattctgcagccctgagagctgccctcaaacacaacccatccctgcgcttcctctccttcctgctcccgttcccgccgtcattcccccgccctccactaggtggcgcattcctttggtgccttttcattttcatgacacctagcacagtgctttgcacacagacctgctcagtaagcactgtttacttattgagtaaacaattatgtaaaatcattcacattgttattaagctcaatagtaatttcttcttagagacagggtctcgctatgttgcccaggctggactcagactcctgggctcaagcaatcttcccacctcagcctcctgagtagctggaactgcaggcatgaggcatcatgcccagcttcaagagtaattttttaaatacgattgtgtaaatatgcaaagatagaaagttaggttagcccttattttaatatatgagaaattaacctctaacaccaactcataaggaatagcaaattctgaactggatatatgtagataacctattgtttccattgtattttgtttttagctctggtttgtcaggctggcactactagtgaagttgggccttttccagaatgctgagatggaatttgaacccttcggaaatcttgatcagccagatctttattacgagtactacccgcacgtgtaccctgggcgcaggggtaaggccatggtatttaatatttgtacatttgtctgtgtgtcgctctggtttgctttgatttatacataatttcgtagcctcagttttccttatttatccagtcttgaaaaatcagataagtacccagcaacaagccttgacttacagaatgctcccactccgatttaccgaaacactgacctggaggtgctccctggtgcatctgtttgtacatttagcagctacgtgtcaagcacctgctctgtcagggcagcatgatttggtgcaggggccgggtagtagacgtctgagctgcgctccacagggaagagccgtcccatatcgggacctggcgcacagagatgcagagcggtggaaccaaacgtgtccgtgcatatggcacacgccgtgacattttccgtttgtctctattctgatttaatttattttaaaaatctggttgtggttcaccctttgggtcacggtcacgaccattgtttggaaaacactaggctacagcatagggtagttctaggagagtgacaagaaaccaccagttgggaagggagaagggcgggttacggagagccttctgcagcactgggagccttgtgcagtgtgcgtctcttggtggagaacctcataaatatgtttgaagcctctcatgtgttcttaaatagaaaacagtcctggcaggatgtcttgtgagggcagtgtaagcagctattgaaagcccacgccctgttgtcaggcatccccagttacatcctgcttcccccattgaatcgcgtagccttggaggagttatctgacatctctgtgccccagtgtccttattggtaaaacagagatgccaatcctccttgctgcctgggttgtcctaaagatcaaatgatgtcacgtgtaagttgcttggaataatggctgctatctagtaccaactgtatttgctggttttcttactctcttccgaatgtatcagtaacatgggaaagtctcgcactgccgcattttgcaggctcgattgtcagcatttgttggctgcagcagtggagctacagagaatggtcctagttgtcaggaaatgcagagcctgattggaggtagaaaatatttaaaaccagtggtacaagagatgcaaaggcctgattaataataaaataataattcctatagaagtctcagaaaatttaaataaacattctgttgaacttggttgatactagtaggtaaatagatgaactaaaaaggctagaagtaaaaacaaatctttgaacttctttgtgtgttgtttttttggttaaaactcagctctgtttctttggaggggcataggaacgaatgtagacgccggctttctttattccccatgctctctcctttatcatctttaccttcctccaagtaggacgggtgggaattggtccatattactctgagttatcccagaattgatggagatttttatcatttttagtataaagtgttttttgacctttagtctcactggtattaaaattgtttcttccttctgactaagggaatttgccccttgtggaaaagaaaaaatgggaagggtaacttttaataactaaaatagggcataaatcaaagagattgtcttgatggagctggcttgatttcatggaagtgaaccaaccaagctaggtagccacagagtcaagaaggaccagcaacaccactatcactctcggacgtaggactctgtgtcatccagggacgtagacgccagtccttaatgtgtgacacttcctgcccacccactggcctgtccagtcctgctggccttccacatgaccaggaggaacagaccaaagccaggaccgcttgagggtgcgtgttcaggagctctgtctgccgtggcctggccaacaggtggaggaagtggggccagaggagtctcgggaacttgctgaagggccctcactggtgttgctggccaagcaggccttctgtccccaggagtctggcttttgcagccatgggttggataaagatgtctttacctcttccctggggtatttcttctcctgcactccagcctggaagctgctcggtggtcgtgagcactgtcctcgaggagcagggctttatccatcctctctcccccggagcaagtctcgtctacgtccctcccaaagttccgtccagtccgcacgtaggtggttcccacatccgctcatgagttggagagatacagccatggctggttgttcaagggctactgttctaccttgtaaattaactgggctccctgattctgtcgtgtccctttcttgtctccacttcatcgccaatttgagggtcatcctttccgtgtaagaccgaatttccagcccaaaaagaatggggagcctgtcacttggtaggttgtgaagaaaagatggaaaggttaaaggcattgttaattggggaagtttgagggtgtttctgtttaatcagttatgcctggtagctatcatagtcaagaaacagctgttttcctatttcttacacggatcagccttgttttcccccatcccagcataaataaaaccatctcttccctctgcctgactgcagcctgagcatcgcctccaaccccgccctcccacgtggttcatagtcccgggagggggctggacccaggtctgtgggactctgcctgggccggggactggaactgggactgaacagctggttttttaggcattttgtctgctgctaacagaaaactcagggcattgagcacccaggccttaatcgaaaccaccagataccctgaagcgcagagctgcaccaagtgctctggtttcttttcctactgaggtccgtgtgaattatagattcaaaatgactcctcttacaacacctgcttctgaatttatgacaggtgtttaagaatgagtgtgactgaaaggcagatgtttcctatcatgaccaggtaaaaatatccagcttggctgggtacagtggctaatgcctgtaatcccagcactttgggaggccgtgaagatctcaagatctcttgaggccagaagttcgagaccagcctggccaacatggcaaaacccccatctctactaaaaatacaaaaaattagccggacatggtggtgcacaccagtactaccagctactcaggaggctgaggcacgagaatctcttcaacccaggaggcggaggttgtagtgagccaagatcataccactgcactccagcctgagcgacagagtgagactctgtcctacaaaaaaaaaaaaactccagctcccattggtctctaacctttacctttggccattcaggaatgcccaacatcgccttgtgtatcctattttacagtgtgctgaagactccgtggcactgtttacccatctctaaggagaggattttgatggaaatgacactgagtgccctttaagatagcgaatgaaaatctgtgggtttaggtggaaactgcctgtcatctttcctcactttgaggacattttttcctaaggacgttcagtcaagcctagaaaacatgctttgattcttcctgaaattaaattgcattggtaaatggataaagagaagacagcagctacgcatcattgagaagctaatttaaattatgaaatagacataaatcatacatacattttagcaaaagcgtattaacattcatcctcaataatatgctggatgtttactaatttttcttcccattttgtggtgtaacaaagcataaatgtaagattttgattcattcacttcattttcgcttgcaatatataagcagagcaagttgttaaaatgtgctttaaaaggaggctataattataaaaacttttatgaatgagctttaatatatttcatgtaaatattgggcgtaatttttgcccattcagaatattcataacaagacatgtaatgaatcatgtgtaaaaatcatgaaggttttttaaaaaaaattcatccaagaaaggaacagtattatggttgatgtatttacatgtcaaatctagcaatttcagtcagttcctttcagccacccccaaagcccagccccgtttctgaccctggcgctgtgtctttcacttggttgtttggagactccctcctgcacacaggaagaatcccgaggactacgtgcctggggccgacccagccccgcgcccccggagctgaggtctgtgcggttctgggtggggcccccaaagccacaagaagcccaggtagcactgactctgacctgggtgtcctctcttgattttcctttcttgctcctcaatctccacccccttttcctctgttcctcttctactgcattcgttgcttcttcccctctcagaccctacatccatccctagaacccagggcccagcttcatccatccccagcacccaggctgcaagcgggagaggtggaagctgcttgcatcaagccttttatcagagttcctttcgtgggttgtggggtagtcattgaaagctcacatttgtgtttagaagccaactggctgggggttgtgagcagattgtccacatcttttcattcactggaagtcctctgtgtccctgcaggacacacttaaagactgtgtggctttagctccctcagacttcacacataacttggcaactgagctgttctgtctagaattgtcatgcagcttcaggaattcagaggatcggcgttggtcatactggtggaagatgtcaaaacaagaagaataaaaatagtgtgcagaaaacttgctcttagccactgtcttatctctgaaaattgaacttcacttgcatagtgataccctgtatcatgcatctccagggacagaaaaaaagataagtatatcttaaatttgcctttcctattcgcgtttctctgattttgaaacagaagttccctatccgtgaattcttcagatagttgaggtagagtactcttgcattgcacaggatgtcactgttgtttccagatggatttgtgcaaattcagatatttgatttttctatgttgcccacgtctatttactgtttacttttactttacttttttttctgttctaatagctttttaataaaagctatttacttttgttctaacccactacttccgtaccttatgagaaagtctgttttgggatctggttgaatctattctttgctcaacaaaaattgatgtttatttaaatacaaatattaaatactcggaccattaacaaatattttttcatatttgccttagacatttttgtaacaaatgaaagtacccattgctgatacagcctgtgaacctcctcccaattcagtcccctcccagaggcagtcacaatcatggtttgttgtgtattcttccaggtcatgtttttacatatttgcttcatacacacacatatacatacacacagagaaatacatatacagagagagactattgtcttataagctttgtaaatgtacatcatgagcatatctgtcttcatttgcttttttttccccactttccattattcatatccatccatatccgtatccataaggatgaacaattaggatctttccacctttcggctattatgagcaatggtgttatgggcatccttgtacatttccctttgtacatgttcaggcgtttctctgagctgtaaatttaaagtggcatatgtgagagtgaccatgctaatttccactcccagccacagcctgtcagtttgtttccccactcttgtgtaactaaagattgtcagactttcaccagtgagtctaaaattctacctcctgtcgcaactgacgtctttctgatttctgccgaattatgtgtcctttgtctgtcggagtctcctctttggtgactcactctttcataatcttggcctgtatttctgttgggttatctttgttattaattggttgaggttcattctatatagtaggtatttaatccttcatctgttttgtatttgggaaatattaatatcttctcccattctgggaaatactattttcaaccctgaaaaaataattctagtttaaaaatacaaacataaccttttttgttcgcaacatgacatgttttaggagtatcttctttattccacatactgttatatcaggaataataaatgcaaagaaatcatgcctatgtcattgccaagtaggctgagacaagtaaagacatttaccagacagctttccaaaacgtttcctaagggagctgctgcacactgttgctgggaccttccgctgggtgtgggaggagctctgcacactgttgctgggaccgtccactgggtgtggaggagctctgcacactgttgttgggaccatccactgggtgtgaaggagctctgcacgctgttgctgggaccgtccgctgggtgtggaggagctctgggagatgcggtgttgggaagagagtctacacagttgctgacttgcagctcttcacctggagcttccaagagctctgaggcaggcccgcagagcccctcgtgcacacttgtcaaagatgctctctctcctggcatacccttgaggccctaggccacctgctgccctcgccgtcttccatcgagtacagtgggatgcacttaacgtgagtgctcccgggatctcatcccacagagtctttggccctgtagacagacagtctctgtaatcttgtaatctccccacagcacagccgtctgccttcactggcacctcagcatctgcagggagcatcccggtcccaggaaacatcatccagcccagagggcggcagggtcgccgtcgccatggatgccagcctttacccagcactaaaagtatttttgtttttgtttgtcttaaatgttgataacttcataataactatttacgttagggctttaaaatacctttccaaaatcctacaaagtttctcttttgagagccattcttcagatccctgtactagccttctttctttaattttcttttagatttttttttttattttttaaattgttacactagtgcagattgtttctcccattatagggtttgcagtcatgaaaagtgttgatagggattatatccatgaaaatatttctagaacattcattcattttatattaacagcttgcattggtgtggtacatttgttacaattgatgaaccagtattggtacagcattattaacaaatgtttatagtttacacttgggttcactcttgtgttgtacatattcactatgttaaagaaaattaaatgtccattcctgacaagtttaatttcatcctctctcaggcagttaaatttttccagacccccaccaccatctttttaatctgttgtttggaattacccctctcgttccaaagaaacattcacaatggcagtgagcatgtaaactttcatagtgctttgaatttttaaagtaccacattctgcattagattgctcacttcaagtttccatgcaactagagggaaaataggagcccaaaagatcttcccgctggaaataaagcagcttgattatcttcactatgcagtttaagaagtatagtgctgcttctaatactaaattcagatctgcatgtttagactaagttacaagagctgtaatgacgtcacaggaaatggtacttcagaacttaatccgtgcggattaccatcaggtcaaattaaagtggatggggcaaacacttccattaatcggatgccgaatctctctactcttccatcagctgtctgctcctctatgtgcataaaggcacactgtcactggatctttcttcctttttcatcctccctccaaaatcatgaaattcacattttgagttctcaaattaaattctgaaacttttttttatcaacacataaccatatgtgatatctcagaattaaatattcagcatgtttccagtgtcggattttatttttcatgacaaaattacctcaccttgcagagtgaccacgttctgctttagatttccaggtcacaatgctttgcatcagaactcccgagcgttgatggttggacatgtgatcgctgctttatttgttcggagaaggctcgttagttcatcttactgcttttcactttgcccaccgtttttatgaaatctggcattttcagtcttttcttagaacaaactactaaaaataggggaattttcagtttggggttccgtatctaccatgagaacacccaaatggagacctctccttatcctgtctgcacaagatacaggccttggccagtcactgggctgtagctgaagccacacgtggattgcacatgactgtggcagacgcgtacagaggcagtgacccaagcctcagtttgtcttcatgcttcagggctttagttaagcaaatcatttaaataagaaatatttaaggtatttttttctcttaggactttctcactgtttttgtgtttggtttgttttgttttgtttttaatttacaatgccacattaaagtcaaaaatgacttgttgagagctgtaagtgtgacactgtgtgcttggccgggcacagacaccaagcagtatccccagcgttgagcacaggcaaaccaaaggcatggcttatcctgcctgctgaggtcaggatagggaaggacacacccagacaggcagagacagtgggaaataaatacaaagcagtcttcccagcaaagcactcgcgtaacttgaaaatgagacggaaatgccagggcaaacttgtaagtttgtgccttactgaagaaagctgttaaaattgggcaaagggtctggaaggctcccgcagacccttctgtgaggcaggtggcacaggcgtccaggcatcatgtcacacctgctgcggcctcacggcaacctagctgcctctgggccctcccgccctagtttgcagtgacacagaaggctgcagagaggatgtgagccacccagcacaaacagctagtgagtggcggaaggtagcataccccactgaagggaagctgaaatgtcatctttgttccctttcatttttcactgcccagcaccaaggcccgggcaattcctggcacatttctcttttctatagtggcagcacggattttcagcacaacaagggacggtctgaaataaattttgtaggagtattttcatttaatgttttctaaatgatgaatgagaacacttctacagtatttataccaacctagattttggcaggtcacaactatacatgggaatcttccggaaaaatagatccactaggaattgtttttccttacagattttgactagcttctcctttttttttcctttccaatgctctttctccctgcaggagagagacgggcctcagggctggtgtggaagccttgcatattttatctcgcttgacaaccaccctcagcatggaggatttcagtgagattcccagggtagctcttcagagacaggggctaggtttggccactgagagaatcagcttaaaggtatttttatgtgcatttacttaagaacaaaagtatgaattacaccaaagcagcttctgtatgcatcttgttgaagaggggagtagtttccttgaggacacggacctcgtggctgtcattgtgtgcacccagtgcaggccctcctgcgcagcgctaggagctgctgagtaaatgtcagctcagtgaaattcacacaccttacctggagctcacagatggtttctccagctgcttccatttattgttttaattctgtgatctatatattttttctaggaaggggtgtttttctttctgatttaattccctacatttttctctttcatatgaagttgcagataatgtttttccttcggatttttattctttaagatttttaacctgtgcaagactttttcaatgatacaagtcaaggaggatgaagatctttttccacttcagtcttcactttgctccagctattgctaagaaaggcacaaacaatgacagcatatttaaggaagaacctggccggcttgggtcaccgctgctgtctttcttggttttgcgtctacctgggagagcccagcttttaggttcccattgagggaagcatgagagaggattgtttgggggatgctgccagagcttccagctgacagtctctgcagagcggctgccaagtggcctggtggccgtatgttggcagtttttgatgaattgggattagggaatgtttgtttacttgataaccgagtgtctacaaggagaggtggcagcgtgagggaatagtgccaccataatgaggacacagccagccatctcttccctgccacagaaccccaggcagtccccttcaggctacagttttccatctggaccgagggactggccggtgcagcaggaggagccgatcaccctctgtgggaacgaggatgcccagaagttccagttactgtggtttgtatgttcttctttttgagatggagtctcgctccgtcgcccaggctagagtgcagtggtgcgatctcggctcactgcaatgtccacctcctacattcaagcagttctcctgcctcagcctcccgagtagctgagattataggcgcatgccaccacgcccagctaatatttgtatttttagtagagacggggttttcgccatgttggccaggctggtctctaacttccagcctcaagtgatctgcccgcctcagcctcccaaagtgctgggattacaggcgtgagccaccgcgcccagctgagttactgttaactgttactgggggggcaggggaatggctcattaacatttttttaaataacattaacatttttaaaatgttaaaatttaattctgaaagaattttgctacattagcgctagttttaattgtgattttattcaatatgtcccccaaatgtaaggaagaaattggtacattttgttcacaaaaataccctccccacctcccaaaagcagtagaaatgggagtgccatagcacgggggagatttgaaaagagcccggaagttgggtttgttggaggaggaggatctgagcacagctcagctccacctgctccagcagcgcagagtccacgagtacaagcaggtgtttggtccccaaggcctcacagaagttcaggcagaatttcatcactttcttttcccttaacccccatttaggttttaaacgcctgtgtggtttttaaaagggtagaagtagcaaggaaacaatatatatctaatgagggacattttcctgtgtgatatgtaatgaatgcactatatgtagtactaattacctgttataatgaaggcactgtatagtaccgattacctgttttaatttgatcctaaggaaggtcaatgtgcattttgaggcattataaaaatatagttgatattacctgataacctttgagttagcgaattttaatttcacatcagtaaggtactgttttagagcagtgcttctccatctcagcatgcacaggagtcacccagcctcttgtggagggcaggccctgatgcagcaggtctgggcagggcctgagactctgaagttctaacaagggcacaggtgataagactgcagctggtcagaatgtacctttaatcaagtattaatattactctttcagctacagctggccactatatttaatagtatttctgagaaaaaaaatacatattttaagtctcaatttgagatcccaagaacacagtccttcaccccaaagaaatggatctgattttatcttttttcatgtggcaatccccatatctgaaccatgctcattaaaaactccattttccatctaataccttggagacaccatctttattgtatactaaagtatatatgtattccctttttgtaatttacagaaaaatcgagtagagagttctatataccctcttttcttctgcacagtttttaataacatcttgcatttttattattaataagtataaaaattttgcattagcgtagaacttttattataattgataaaccaatagcggtacattgttgttaaagtacatagtttaccttagggctcactcttggtgttgtcccttctgtgggtttcaacaaattaatggcgttgcgtgttcattgtactgtcatgccgaatagtttcactgccctgtgtattaatccccccaccacccctggattaatacccccatcacccctggattaatctccccactacccctggattaataccccatcacccctgaattaatccccccatcaccccaggattaataccccatcaccccaggattaataccccatcacccctggattaatctccccaccacccctggattaatcccccaatcacccctggattaatccccccatcaccccaggattaataccccatcaccccaggattaatcccccaatcacccctggattaatccccccatcacccctggattaataccccatcacccctggattaatccccccatcacccctggattaatcccccaatcacccctggattaatccccccatcacccctggattaataccccatcacccctggattaatcccccaatcacccctggattaatccccccatcacccctggattaataccccatcacccctggattaatccccccatcacccctggattaatcccccatcacccctggattaataccccatcacccctggattaatccccccaccacccctggattaatcccccaatcacccctggattaatccccccatcaccccaggattaataccccatcaccccaggattaataccccatcacccctggattaatccccccatcacccctggattaatcccccaatcacccctggattaatccccccatcaccccaggattaataccccatcaccccaggattaataccccatcacccctggattaatccccccaccacccctggattaatcccccaatcacccctggattaatcccccaatcacccctggattaatccccccatcagccctggattaataccccatcacccctggattaatccccccatcaccccaggattaataccccatcaccccaggattaataccccatcacccctggattaatccccccaccacccctggattaatcccccaatcacccctggattaatccccaccacccctggattcatcccccacctacccctggattcatccccccatcagccctggattagtacttccacccctggataaatccccccaccatccctggattaacccccatcacccctggattagcccccatcacccctggattaatacttccacccctggattgatcccccatcacccctggattaatcccccatcacgcctggattaatacacccactacctctggattaacccccatcacccctggattaatacccccaccagccctggattaatcccccgccacccctggatcaatccccccaatccccctgggttaatccccaccacccgtggattgatcccccctcacccctggattaatccccccatccccctgggttaatcccccatcacccctgggagcttggagtctttccattgtctccatagtttccccttttccaaaggtcttatagttggaatcatacagtatgtggtcctcagattggcttcgttcacttaggaatgtgcatttagggttccgctgtctttttctgcttgatagtacgtttcttatctcatgaataatattccattttatgtatataccatagcttatttatccatttctctggtgaagaacatcttggttgcttctggtttttgacaattatgaataaagctactataaacattctttttcagggttttgtgtagatacaagttttatcacctttatcagttccaatccttgggtaaatctctaggactgtgattgctggatcttatggtaaaagtattcttagccttgtaaatatctgccaagcatcttccaaaactttcatactattttgctttcctaagagcaatcaatgagagttcctattgattcacatcctcagccagcttttggtattgtcattttttggatttttcgctattctgataggtgtgtagtgttacctcattgttttaatttgcagttccctaatgacatatgatgatgagcatctttttatatgcttgttattgataaatctttattggtgatatgtctgttcagatctgttgcccatttattaattgggttgttttctcattgtctgttttttggagacagagtctcactttgtcacccaggctggagtccagtggtgcagttatggcccactgcagcctcaagcccctgggcttaagcagccttcccacctcaaccaatggagtagctaggactgtaggcacacctggctagtttttgtattttttgtagaaacaaaaaaaagcgatcagctcgcctcagcctccccgcgtgctgggatcccaggcatcagccaccatacctggcctgttgttgatttttaagaattcttcatatatgttgaatacaagttctttatcagataggtgttttacagctattttcttcctatctgtgacttgtctcttcattactttaatactacgttggacagagcatacgtgtttaattttaatgaagtccaacttactgatttttttctttcatggatggtgtttttggtgttgtatctaaaagattatcagcaaacccaggtcactcagattttcatctgtgttctgttctagaagttgtatagtttttgcactttacatgtagtctgttattggagttcattttggggtaagatgtaagatctgtgtctagattcattttttttttttcatgtggacgtccagttgtcccagcaccatttttggaaaaacctgtcctttctccattgaattacctttattcctttgtcagagatcaaactgactatatttgtgaggaccaatttcttgtctttctgctctgggccactgatctatttgtccgttctttttctaggaccacacagtcacccagtcttttttacagtagctttagagtagctctgtaaggtgggtagtgtcagcctgccagatttgctctctttgatattgtgttggatgttctgggtgttttccttctccatattaacttcagaatcattttgttgataaccacaaaataatttgctgagattttgattggggctgcatcgaatctgtaggtcaagttgtaaagaactgatattttagcagtattgtcttcctgtccatgaatgtggaatatctcttgatttcttcagctctgtgaattttttcatcagagttttatagttttcttcctatagctcttgtgcatattttgtccattttatacgtgggtatttcacttatttatgtagaaatgatagtgtgtttttaatttcaaattcccatcatttattgctagtatctaggaagccagttgacttttgcatattgatcttgtatcctgtgacttttaatcacttcctagtttagaagtgtttttgttctttgagattgttctttataattatgtcattgcaaacaagtagttttatttccttcttcccagtctgtgtacctttggttttcttgtcattgcattagctcgaacttccagtacaatgttcagtagaagagataagagggaacattgttgctttattcatgatcttagggggaagtcactgagtttctcactcttaagtttgttgttagctgcagttgttttgtagatgtcctttattaagttgaggaagtttccctctattcctagttggctgagagtttttatcacgagctggtgctggattttgttaaatgcttttctacatctattgatatgatttttgttctttagcctgtttgatgtggtagattatgttaattgattttggaatgttagatcacccctgcatacctggaataaattctgtctggtcatggttcataattctttttatacattgttggatttggttgctaattttttgttgacttcagttttcttagatttagtttgctaattttgttgaagatttttgcatttatgttcatgagacatattggtctacagtttttttttcttgtaacgtctttgtctggttttggtattagggtaatgccagactcatataagaagttagaaagcgttcctctgcttctgttttctgaaagagattgtagagaactggtagcatttcttccataaatgttaggtggaattcacagtgagaccatctgggtctggggcttgctttttggaaaggtttttctttttctatccaagttaccaaatgtatggacatagagctgttcataatattcctttactattcttttactgttcataggatccatagtaatagtccttcacttctagtactagttgtttatgtcttctctgttttttgactagcctggggagagacttattggtcttgtcagagttttattggtcttgtcaaagaatatgtttttggtttggttgattttgtctattgatttcctgttttcagtttcactgatttctgctctaatttttattattatatttttattattttcttattataatacaataatatttttattattttcttataataaaatattttattttcttataataaaataatatttttattattttcttctctactgcttactttaggcttatattgctctttctttccttctagttttcaaaggtgaagctggtttcagatctttcttttccaatatatgcatttaatgctaaaaagcttcctctcagcactgcttttgctgcatcccacaaattttgataagttgtatttttattttcacttagttcaaaatattttcacatgtgcttttacatccagaagcacccccatgtccatgggcagttgtcaggataaggggcagctaactttctgccaccttctcaggtgaagtggcaggagtcacacagcctgttttctcaccatccaccaaactgtattccagatcggagtattaacagctagtctataaattgagatcggagtattaacagctagtctgtacgttgagatcggagtattaacagctagtctgtaaactgagatcggagtattaacagctagtcccaagttgggtttgagaacttccagtagaggtttgtttctgtgcttatcttatagagcttgaagggttcttgagatattctctcccttgtggtaagtgataaaccacacaggagtgattctggccccttctctacttgagacagaaggatggaagtgacgtggcttacatataacttaccatgttgggccggttccacagtgacatgacttacatatgacttaattgtaggccagtcccctgtgtcattatgcggatggtctagaaatgtttatttctagaaaaccgaagtgactcaggctgtaacttaagctcggccagatattctcttgagatacagaaattatttagtggcatcaaaaaagaaagtttaaacattttaagttcaataattgttacctttcttttctccaggcttataatcacaatagaactgttttccatagtgttccttaattttgactgtcttctttttggacctttgttattaaagaccataaacataaagctcatttcagtgtggtcacggcccattctcagtaatggttaatgaatagacagatggatgcattgaggcacagatacattaagtggcttgcagaagtcatacgcgtgttttctcaccatctttcagactatattccagatccgaatattcatcgcttaggcctattttgaaaagcactttactgaatctatgtgattgccctctggcatttctctattctttatctcatttataatcagtgcacgctatttgattttttgatgattgttatctacttagtatacatactacagatcaaattccaaatcctattagaagagaacacaatattaacaaaaagttgaccttaccctgagagatgatgcagccacaggtgatacgatataaagggggtttctcctgagcttcttcctcttcttagcgcacgcaaagccaggcagctctgggtgatggatttttcaagtccagctcccttgcctcctgtcagaggtggaacgcaggctccagggccacatggaatccagtgggaggcccatccccagggccgaggcctgagacgcacctgtgctcagtttcgcctcctccccactggttttcccgggagcacttccggaaccactggctggcttacggcttctcccttcagggtctccttctggggaacccaagctaagcaacctaccattcgagcttgctaaactaaagaaatattaaagaatatctgagcattctggtttttcttttattggaggaggggttggcggtctctactgtttcattcattttgggatcatttctaaatgattgcagtgtagctttggaaattgtggtgtcatccacctgtctcctctgataattgtcgagacatacatacatagagctccatagagaaaaccagcatgtattttatagttgacaccgttaaatacttcacaagaaataaagggatctgtcatcacttctgctgggacatctgcgacgcctccttcaagtgtgccaagtatgaatgcgtgctcagttatggcaaacaaactcactcagcactgattggattccaggctccatggtccccttctcgatgcgcatcttgcacgcggagcttcagcagtacctggggaacccacaggagtcgctggatagactgcacaaggtgaagactgtctgcagcaaggtaggtggcgctgtcattcttccctgccacggggagaacatgccctccacgccctccccacaggacatgcccgtgctgttccctgcccgtcctgccccatgcaccatcgctgcttctgccttcagaaggctaggtgacccggtttgtgtggcctggtagtcgtgtctcttgctgaaatcttttttagggatggtaagagtttctagcagagcttgagtcctgtaattcttactgcctggtactatgggaagctgaaaggcagagacatctttcttgccaaggctgccagctgaagcttcaaggtcagtgtgccagaccacccctgtgtcccacaagtgcccacacgcacctgccacgtgcagacagaggtaccggagcagtactgaaagcaatcatggtttaagctttcaaatccaagtaagtgcttctgcattatggcaactgtcactcatgatcctgactgcaaaggcagagtcggagtgttttcggactcattcttggttgtgaagtcacagttaatgtgggagccaccaaagtggcacgttattacactaactgacattgggaagaaatgtgggactcagagactttgctgtctacaggttgttatagagtattcatctcagattaggaatgatcctgcctttctacccacgtcacagtgttcctgtataggttcagtgacataaggtatgcggaagtactttgaaaactacaacaacaagcagttattaggagcagcagcatattataatttttgggaaaactaagattcttcttgtcagattcctcctttcacttcctaactgttgtggtagaagttttgcggagttccaagatgatggtgttaacagtgttcctagtaaggaaggaaggggccctctttatccttatctgtggagaaaaaacaggcgtttctaggccccttgttgtcctgggctttgtacccacttccatttttttattaccataacttaaaagataaaaagaaaaattgtttgctttctgtactatatcagttgatggagaatcatgttaccaacttttttacatttcaacacttttcttgaatcttaaaacggggtttaattttatttacagaaatcggaagcacataacttgaaattgagaagttctaaatcagtgactttctaaactatacgaatttttcattatcctccatgtcacattgtaggaaatctttatagtatttgagagagaaaattctgggccatagggtgatttgtggatggaaaagccaagttagttgaagtagttttgcaagtcagctttcctggtcctgaagtatgtcctatttcagaattatgctccttaaatgcatactacaggctgggtacaggggctcatgcctgtaatcccagctacttgggaggctgaggcatgagaatcgcttgaacccaggaggctgaggttgcagtaagccgagatcaagccactgcactccagtctgggcaacagagcaagactctgtctcaaaaaaaaagaaaaactgcatactacagtgtaacgatgagaggagccacttagcactagctatgaagcagcagggacggtggagcagagagcaggagcttcccacaccgctgctctgggcacctgcacttactccacctgacagacacctttgttgcattcattatgaggcagccactgctctgagttccaatattaactcatttaatccttatcacaaccctatgaaggagatgttattatcccaatttacagatggggaaactgaggcacagataggttaggtaacttaggatcacatgagttgaacccaagtcatctggctctaaagtccatgctcttcatcacttgcctggcttcatcactataacatgtcccgtttgaagacagaaggaccgagagtcctctcttccaccctgcaccagcatttctgctccaagaaaggacagtgctgtccggggtcaactgacatctgctcagaagacccctgtgctgaatggggccctgccccttccccctgactgatgcctggagatgggctcgagcctgtgctctgctgggctgggccctcctgagactcttgagggggcttccaagcaacagcagttgacagctaagcatcgtagggttggggagaaacgagaagggttagtgcagtcacatcctaggaacgtttctctcaggctgactgggcgtggggccaccgtcagtgagagagccactcatgcttctcgttccctccgctggtctacagttccacctgcctctcatcttgtgaatacataaccgcacttcaggtatctctcatgtttaaagatacatatcttttccatggcatgatccaaatctaagccaacactccttatggtacttaaatgaggaaatcgcaattcgttctaatcctggaagaaaaacaagcagttggatttatgaaaaggtgtgtgttggtcttcaccttaaaggattttcaccgttaatttcaatatgtaattactatgtgttcctttatgtgctgacttaaaatttgacaccctcttgagagagagagctgcactgtggcacagctggtggatgcctggaccaagagggaaagacccagggcatgaccatatagtcagccttgcctgtccgccacctttggcaggagaagaagcaccgtcgccaacttcctcgctcacttccttgcacgttaggggctcatggccgcatgtgggcattcttgacctttctgcggctggttcagtgttgaactgaagcagtttttatctggatgtgaacagtgggcactgcggggacatggagcaatgcgtctccacgctgtccagaacagctctatctgagcttgttcatttgttcatgcagcaaatgccctttcagcacctactgagtactgcacactggcagttcgggactcaacagaacgcagcctcgccctcagtgagtttacagtttggtagacgatgcttgtttcacctgttccttttaggtttgcagccatcaccaatacatcatgatcctccagaatttaaaaagggacagtttgtgttcatgctagaatttctttactcaagaagtgtgtattagtccatctggctttgccataaaggaatacccgagggtgagtcatttataaagaaaaggtttattttggctcacagtcctgcaggctgtacaagaagcacagtgtcagcatctgcttccagtgaggcctcaggaagctttttttttttttcttgaagcggagtctcgttctgtcacccaggctggagtgcagtggcgctattggctcactgcaacctccacctcccaggttcaagcgattctcctgccttgcctcctgagtagctaggattacaggcgcccatcaccacacctggctaatttttctatttttagtagagacagggcttcaccatggtggccaggctagcctcaaactcctgacctcaaatgatccacccgccttggcctcccacagtactgggattacaggcatgagccactgcgcctggccaggaagcttttaatcatagtagaaagcaaaggggaagcaagtgtgtcacatggtgagaaagacagcgagagagaagaggaggaggagggaggcaccagactttttttgacaatcagatcccaaggtaactaacagagccagaactcattcattgccatagggacggtaccaagccacccatgagggatccacccccaggacacaaacaccccccaccaggccccacctccaacactggagctcacatttcaacatgagatttggaggggatgaatgtccaaactatatcatagtgcaaaatctaaaaatactaaaagccagcccaccactattctgccagtgttgatttgctggattaaagtgaacggcttggtgtggcctttgatcccctctgctctccactggtgagtaaagagagaggtcagaccagagactccagggttctccagcatgacattctgattttcccagaccttcacaactccaggaaatcctcaggaagtcttaaactaaggatgtgttagtgagacctctccgtccgtggactgccctttgctgcattgtttaaagtattcaccacacctgccccaaaccacacgcacacacacagctctgctcaggacacgtgctgtgtgtcccagcactgaggtgcagtcacgtgttaacgctgcatggatgtgtgaggtgctgaatgcattatgttgattaccccctactaatgcccacagcagctgcaagtgattttattatcctcggttcccagatgaggaaagtggcctcagggaggtgaagtgttccccagacaactgcagtgaggcagcgatggagcctggctgagccccatcacacagctccagaagcctcacccttgagcaccactctgcggttctctgtgaaattagaccatcaggattgtggttttttcctccaaatacagacttttctctgatgctttgtaaagcaggggctctaaagtttggtcttaagcgtcacttgaacagttccagaaattttagcaatctctactgcacttgctcctgccaaaaattgctctcagtagattcagggaactgtggactcttccagtgggtgaggagagtcaaacagagtgaaaagaaatgagtccagaatgttaaacatgatttcctttggtgccgttttccattagctcctcctcccgcagggcgtggagagcagccggttactcgagggtagggcgtctagagcagccggttacgcgagggtagggcgtggagagcagccggttacgcgagggtagggcgtggagagcagccggttacgcgagggtagggcgtggagagcagccggttacgcgagggtagggcgtggagagcagccggttacgcggttacacgagggcggagggcgtgtgccgggagcacaatccgggccgaggctcctggtaagggagcagagcgggaagctgatcccccacggattcttagggggccgacttcccctgtgttgaagattcatcaaagactgattcgagtctgtgttcagcatgtgtgttttagattagaacagtgttgagaatttttatatggggcccagttttagcaggacatcatttaggatctttacaaacgagttcagggtacttcgttttatctgttgtctttgagccactgagtgaattagtaaatgtttgcaaatgtgattgcatcagtgaagaagaacatataccacgagttaaaataaatttcccgtgctgctgaaaaatcagtgccgccatcctctgaccctgctcctcccacgcgccctgcaggctgtctccctctggggtcgagagagcttcacagaccatttgggaaagagccaagcaaacacacttctgcaagccatttgcataagtagacataatccatacggaatgatgcactgttcggttgtagtttcattcgtcagtgacctgcatctgcccgcccagtcttgagttcagctccatccctccctgcagttccgcagcctccggcttccccacctcagcttggctgagagtttcacgttcatccaagtgcttctttacagactcactcccagctggaggaggcagagggtaaggtacattttcgtgcactccggaaaagaaacgtattcaacaatgtccatgtagcttttgcttctctattgataattgctaatgtggtagtgagagctttgtttgtaggaagagttaatatcttttctaaaagggttttttgacagatggacattcttcagttttgctgtcttatttgttaagcaaagttagaaacataagtgagaacaggcgtggctggcctctaacactgtcagggccaggactcagggcctggccacccgcacaccgacagtggccagttattgccatcaccgtgcctgacccagagggtttggttgcccttcttttctgctgcttccacagaaaacaaattgattgtggcttaatcagatgagatgggaatgactggcaggtggggagaagaaaggaaaggccgagtgaggatggccatccatcgaggccacttccctgctctttgccattgaagcccatgctcctggaaccccgtgtgtgttcagaatgtgcaagcagaagaagaagagggagcggaaagcactgggcatcagggctttccaggggaatgtcttgacctggctggcagtggaaattcacaccttcagaaacctctagagttcatcgtggccaatcctgggacatggacttaggaatgcccaaccccgccacccagccgtggcaacccgattcaaaaccaaatgcaccaaatgtgaactcgaaggccatagcccttgccagcgacccagccctgaagcgggcatgatagcccagagaagaggcctttgatgtaagatgattcttaaatcgtgcattctttgccttgcttttctcggcagtatgtgttctgtcaatctgtgatctgagtagaaagaagaaagtgtattttcaaggtatgaggggcccagaggacactgtcccaaaagcagtggttgtgagagtggctttggagtcaggctgacagtctggaagcttccaggtccgctctgaagtgccggctgcatgaccagccctccagcctgtgtccgcttcggccttctttgtgcaagtgagagcattgctgatccccccggggtggcgagggggcgcacgtcagtgacctcgcatggtgcctgccaggcacgtggtccgtgtttcatgattctttgagagctttggagcagctccaagaagactcttttactttgaagaggtcccctgggaagctgtggtgggactggaaggtcgcaggactttccaaaatctaagtctctccagaacagagctgctccaagctttagtctccactcaaaagggtccacttagtaagttctcaggtccctggcttagtgccagcttcccagtagtttgtatactagatgccttgggaataaaaccagttccctaaacctatcccgtgctcacccacgacccgtgacagctgccaaagggacagacgcaaaggctccttcctcaaggccccctgcagacagcactttccacactgaaggtgtcagtgacccagccagaaaacctgcttcaccacctcctggataactgcataggatgaaaacatagatttgggtctctttaaatatgaataggttacaaattgcctttttaaatattgcttgagatcaagtggtagtggttatatatggagtcaagcagctgggatattcattcaaggcgtgtaattttcttcattctttggacaaaacacaagcaggtttttaattttgaataattgatcttccctcccatactgtgggcaggtgttgatggttccccaccttgttagcctgaagcctgttcatccctggaccggccatgacatgcccagtgcagtatcccccacggtggggctggcagcagcccctccacactatgcacagagcagtctgagtctggaatcgtctcttcagccttacagctgttccatctgttattttctccaaactcctcttccctgcatttccaagcagcgtcttctcatgattacagtcactttcagagatgagctcatgctgatacccaatgaagaacccagttcagaattttctttttttttcttttttgtttttttgagacagggggtcttattctgtcacccagactggagtacagtggcatgaacgtggctcactgcagccttgacctccccggttcaagcaattcttctgcctcgccctcctgagtagctgggactacaggcatgcaccaccaagcctggctaatttttaaactttttgtagagatagggtctcactctgttgcccaggctggtcttgaactcctggactcaagcagttctcccacctcagcttcccaaagtgctacagctgactataagcgtgagccaccatgtccagcccagaattttcaaattaaacaaaactaaccctccaacatgtttcagtacagtggcctcaatacactattcctcatgcaaagccttcagttgaaagtgctgggtaacttggatttgcctgtgtgttgaccatcagttgctgcctaacagattatctgcagctctgtgggctaaaaccacagggatgtatgaccttcctatttctgtgggtctcgagtccagcacagcttctgggtcgcactggctcaggtctgtcctgaggttgcagttaagatggtgaccgcagtgtctcacctgagggctcagctggggctggagaactgggctccgggaggctccgtcatacacccgctgagttctgctgctgttggtgagaggctgggttcctggcctcatggttctttctgtagggcttcttgtgcgtctcacagcatagcagctggctccctgcagagagggagggaggaggaggaagccacagtgccttgcacggccgggtctcagaggtctctatgtcccctccacctggttctttttgtcagacgagtcactaagtccaggccacacgcaagggatgggaatgagactctgccttttgaggagtgctcaggaatgcatggccgcatttaaactgccacactgtggccggtcagctgggtctgttccacttcaggatccacaggcctctcctggccctgcaggacaggctcccctgcctccactccagcccgtcctggtggttgtgagccgcacttaaccctgccaggatgcggcttgtactgggaggcccatgggctccgagaggacttcccttcaacctccaggcaccttgaaactgcccagcagccaaacctcagagctgtggaagctcctggacgtttcaaagacccacttaatatttaatagtcagtgcagcattaatttcattgctccccgatcccacatatcgaaacctttcacagtttagtacagggatgatggtgaaagagaaaccacagggaaaatccgaggcagtggaattgtttaatttctggttgcttctcctcttatttgtaattaatatccattcagcatctttaaagcttacaaaatgcttcaagtacattctcattggagttccatgatttgtaaaacaggcatgtgaaaaaatgggaagctaaggaaataggaattcagaaaaggtacactgaaggtacgctgaaggtcagcctgaacttgaacccacgtcttctggcaccggacatccctgttcttgtcactgcggcactttgctctgtgtgtggaaagcgtgaagggcccctgcaaatggacatgatgctgcctcctccacaggtttatttttgtgaaatcaaacagaatactgtttgtgcttaaaaaccatcctgcgcccccatctgtaaaatacatcgtccccggtacttcccagcaggcgctaagcaccacccacactgccggcgcctgaccagacagctccatggagctcctgacccagcttcaacccgtcgggaacagctcccagggaatgtgcaggaaggtgcctccaacacccggccctttctgcccctcggcccctgtggtcactctgccctccacagtccttctgcccctgtggctggtcgcttactgctctgtgcatcttcctgaagcacttggcactgttgcctcatctctgtcctcttcctcctatgccctcgcctgggccctcagcagcttccagcagggagggtgtgggtgcagtgatttggatcatgcccctactcctcagagcctcttcccaaacgaaccgggtgtggcgtgctgggcctttattcttctgggacacaaacacgggactgctgattggtctctgatatagaccctggaatctgctccttttgtctggggcaaaaggaaccaaggaggaaattccagccgcaccacatttgcaaacgacacactgtcgggctttttttgcaataactgcatttcctaaataattcagtctttggattgagaacgtgtctgtcactttcctttatagaaataaccttttgtaaattaatgtactgttactttataaagccagacaactgtctctagatagacagcaataaaagctaccaactgtgaactgctgtttcttttcctttcactcatggatgctcttctgcatcacactgggacctatcaattgacattaaatgacacaccctacaaataaaacaatagtcactgagggtcagaaggttgtgtctgatatgcctatgttcctgtcaacaataggggctttctccagctgtccccttctcgggctgaagcacctcagtgacccagatccctgcaggcacttggcgtcgttttgtgtgtccctctgccccagccaggagagtgctttttgcagagggaggggtgtagcctgcctggtgtctccgtgtcctacctgtgtgccctcccagctgggtaggtgggtctggaggggtgtagcctgcctggtgtctccatgtcctacccctgcgccttcccagctgggtaggtgggtctggaggggtgtagcctgcctggtgtctccatgtcctacccctgcgccttcccagctgggtaggtgggtctggaggggtgtagcctgcctggtgtctccgtctcctacccctgcaccttcccagctgggtagatgggtctggaggggtgtagcctgcctggtgtctccgtctcctacccctgcgccttcccagctgggtaggtgggtctgggccaaaagcagctgctgcaggtggagctcccgtcactcacatgctctgcgtttgatgcctctgctaagatggagcctctgtttctgcatttatgcatcattggggtgggaaactctgtttccttttttctagacctttctcttcctgctgcccttctgaaggacctcattcccccttctcccctcattggccgtgatagtccacagggaacgtcagccccagcgcagcttgtgctgagaccaccatggccctgtggtgcgggtcttctctcaggccttgcgtgctcactacagaggtctggggtgtttctgcagggttttctcctccactcagcacgtggagagatcgcccatggcatggagagatggcccagacccacagagacctcgccgcatagaggatttgcccagacccctagaccccgccacgtgaggaggtcacccaggcccgtagggctcccgtggtgtgcggaggcgcagaacaagctcaggagtctgctgacctggtgcgccacaccccggggaccgccagtgggcgtgttcgaggctccgctgaccagggcgctgtcaggtctggttcgggcagcggctttgcctctgtgataggtgtcccgtccctctttcttcctgtgctcccactagcctaagggaagtcagtttcctttttttaataaattttaatttttgtagatacatagtaggtgtttatgggttataggagatattttgatacaggcaggcaatgcgtaataatcccatcagggtaaatggagtatccatcccctcaagcattgatcctttgtgttgcaacaatccaattatgctcccttagttatttttttaacgtacacttaaattactgtagtcacccttgtactagcaaacactaggtcttatttgttctattttttttttgtacccattaccatccccactccatcccccactactgttcccagcctctggtaaccatcctcctgctctccatctccatgagttcagttgtttaaagtttagctcccacagataagtgagaacatacaatgtttgtctttctgtgcccggcgtatgtcacttaacacagtgacctccagttccatccatgctgttgtaaatgacaggataccattcttttttatggccgaagagtactccatcgtgtatatatggcaattcctttatccccttgtctgctgatggacacttaggttgcttccaagtcttggctgttgtgaacagtgctgcagcacacacgggtgtgcagtgatctctgatagactgatttcctttcttttctttggagtatatatctaggcatggattgctgggttgtatggtagctctattttttgtttttttgtagaaacctcaaactgttctccctagtggttgcactgatgtacattcccaccaactgtggacaaggggtgagggaagttaatttcatggtaacaccaagcctttcctttttgtcagtttctgttcttatgatcattcattagaaggcagattcactgaagaatgtcgttttacctagtttaaactggctagattcttttcaaggttacaattttgaaccccaccttgtcccctgagtcatcgaggtagcccaagataacggttaagaggaaacatcctttgtgttggcagcaaattgttctccagtttctgttaagtagtgtcccttgcaggtgaggagaggctgctttcatcctcagcaggtagagaccggggagtcggaccagcggaaatcctcacctcctggggtgggccgtgtggggagtgttaactggcaagacgatctaaattctctacccagatcacagcggctacagcagctttgctttcagagaagaaaacacaaaaaaaagtgcccaaaagttaaaaagcaagtggtaaaaccgggaagcgacacgttgcacaaaacgtatttggtacgttaaaaaggccagaagcacggtgccctgtaggaatgagactgacatcttcacaaaaggtcatcatcagtctcatgtgacattctccatgctttttttttaaagacagggtctcattctgtcacccagcctggagtgcagtggtgcagtccctggtcactgcagccttgacctcccaggctcaggtgatcctcccacctcagcctcccaggtagctgggaccacaggcgcacaccaccatgcccagctaatgttttgtatttttgtagagatggggttttgccatgttgccccagctggtctctaactcctgggctcaagtgacccacctgcctcggcctcccaaggtgttgggattacaggcttgagccaccgctcaatcccagaagtgttgggattacaggcttgatgcttttcttaaaaaacatattccccatgtatgatgtctgcagatacttcaagaacatcataaacaccactttcaccatcagctgggagcagagtccctccccattcactgtcgccccacgccatagggacttggtgatgtttacagtgtgtccctgtgggcgaacgggataaggaaaagatggtgcacatacaccgtggaatactacgcagccgtaaaaaaagaaccaaatcatgttgtttgcagcaacatggatacagctggaggccattatcctaagtgaattaacacagaaacagaaaaccaaatagtgaatgttttcacatgtaagtagaagctaaacattggattcacatggacaaaaaatagaccagagactaccagtggggggagggtgggatgggaggaagagctgaaaaatgatctgttgggtcccatgctgactacctgggtgatggcttcaatcgtaccccaacctcagcatcacccagtatacccaggtaacctgcacacatacctcctgaatctaaaataaagttgcaatttaaaataaataaaatatcaaatgttttaatattttttaaaagtatgtgtgaacatcccttgacaaattgttttcatccagagaaatttgctgtactgagattatattataacaaagtcttagacaaaaattggttcccatgattttgtccttctcatttggaatgattgcagatcctggccaatttggagcaaggcttagcagaagacggcggcatgagcagcgtgactcaggagggcagacaaggtgggtcggccggactttgctgactagatgcttctcggacatcactgacagactgagcccaaagcctctcgcttcctctccttctcctttcctttctgtagtcagcactgcacgtgtccactcgtgcatttgcaactcactcctttcttggggaagccaagcacatcactgggtgatgctgtgggtgcaacgtgcagcctcagacccgaaccctgcgcccggggagaagacacgccttcaccacaaaagcacacggcccggaacctgccacgctgagtggtctgagtgggcgcgaggaaggagcccagcccagccgaaggggcccagaggggcctctgcgtcggggagagaggcctctgcgtcggggacagaggcctctgcgtcggggacagaggctcgggagggtgcttcaggaggagctggagaggaaggcccagagcctggggcaggctgagggacctgggcagttccctggagcattggaaaccccttgggggactgggtgggttgacatgagctgatctgcacagtgaggccatgccagctgcagctcggggagtgcgttagccaggagcaagcttccgatcatgcttggaaacctggcctgagtgctccctcccaggtagccccaccctagcctcactccctcactccttgtggcagcatctccccacaggcctggtggcctggtcatctcctccttcccacagcttctgtcctactcgatgtgcagcccaagtcaagatcgggtggtctccgtttccgcaggtgtgctggggtttctggggaactgctggctggtgtgagctgaacgtgtgtgaggtgtgtatgtgtgtggtgtgtggatgttgggtgtgcatgctgtggcatgtggtgtgggtgtggtgtgtgcatgtgtgtgcacttgtgcactctcttttcagtaatttaattgcaggtagagtaacaaggtctgaaggagagacggcactgtctgctcatggatgtcccattcagcattcttggcaaccagtcattttacccctggttgggctcctgctttggtgggaatgagcatgtagttatcagagagcagaaggctgttcctggaaatctaacagaaggtcacacccatgagcatttataaggagggtaggggaggatttagagcaggaaaggaatctgcaaagatcatcagaataaatatgcaattcattgagacaatccatattttacatccattaagagaagatattcagaatttcttttcacaaaaataatggtataaggggaacataagcagctaatgtgtttttcattgctgaaaggcaaagtgagttaagtttttaattctagcaattaagtttctgtgtgttctcctgaagcacaccgtaaatgcacatcatttctaggtgattgttatctcacagtggacgcttggtgccagcggtgggtcagcttcagcctcctaaatcacagcctcagaggcagccagggacacacggctcccagtgcccagcgatgagggaggccaggagcactcccagggcctggtgctgcccagggtggcatcttggcactttgcagttggaagtgtggacttttcttcgaggaagtagacacagcacaggcgcaaggagcgctggacaaggggtcagatggaagcgtccctggcctctgtggacctcagcctgcctgtcaataatatgttcatttcagattagctcagtcctcaacctgcgccttcctcctggtcatcccaatgataaacaggcaccattggtcagcccaccctccccccagggcagctcccaggggacctttgcagaccccaagaaggccacaaagccagtttggaaactactagaagagatgggccctgaaggtttgaaatcagtggagggatggctgctaactaaataatgtgcaggggagagcagggagggacgggccaggctcagggtcgcggtcagccaccgtgtggcagcaggtgctagggaaggaagccagctgcaggggagtgccgagtccccagcggaatgtgccagccacttgagttctggaacacggtgtagcactccttgggggaaccggcgtctgcaccagcccatggtcgggaggcaggggaggcctcatggctgggcatgggtggggccctccgggtggcctcccataggtcaactgcgagaggctggcggccaccctggccagtggccctcccagccttgtcgagctgcaggcaatgtcgtcgtttctgtcagctttgctccttttctcagggttctggctttggaaacggggcccccggtcggaccatttggccttgtgtctgggctgatgctgagcagccaccctcctggttctctgatgccgagggtctcttcccaaagccacctctggtcccaatgcgagtgctgtattttctgcctcagtgcagcctgcagcatattcagcattccaggccgaaatccagtggtgttaacaagagggatcttttaaagttaaattagaattcacaggacccagtaattgagggctagaaagagcctcgaatttatttgtgcacttacaggctgctcttaccttgtagcctctatccggctgtggaggtcacgtctgggccgggtgatgtactccatggcaaactgtctgctcctgatgaaggtacgtgggtggccaagcagggctgccatgtgatctggaagagcggggtcagtgggagccgcgagggagccgctggtataatagatgctggcagggaccggccgtgcagagaagccagctaagtactggcttaacagggagcccagtgacacattatggggctatatgtactttatttctactgcaagaaatttcaacagaatgtagaatttagatgatcagatttcattattgaaatgtgggtctaaatgatttaattaaaagtattgttcattttcccccatttttctctgaactccatccccagaaggtgtcctttgttctccctatcttcgtggagggtgtttttttcacctcatggttttgattttatgattgatgcttacaacacctgaagacaggcttccccacaagaccttcttaggacgtcaccccagagctctcagcccgcagggaaacagcttagaaatcaaggagctgaactgaggctgtcatctgtttttccgtgtctcctggctctcgccagcctgtgcaacggtgttttttggctcctctctttgtttggaacgcaccccacacctggctcacctcccacactgggcatcagggtgccctgtgtggagctagtgtccctgcagccagctgtgcgtactgagagctactgcaggaatcagctagcagcaggcgctccggagcagtgcttgtaacacctcctgggctgttcgaagacagcgaccttaactcccacacccatgcggctttcatggggccaaggtcattcctgagcttgattttcagcaaggcagagcaggcaatttaccagcggagaactgtgctcacgggctctgtcatgaaccctgaagtggcagccctgctttatgcacggaccctgcagcatccccagaggtgactgtgaccccgggcactgctccgagcaggctgggtgcgggtatagattcacagccatcagtggctcaggcattccatcaggaagacgtgcagcccgcaccccggctttagcgcagccccagtgcccagtgcggggccgctgcctttgcgcttctgcgtctacgtcaggctggacgcacaaggagactcggcgtcctgttcatcctcggtagcaagcgaccgtgacgcagcctcgcactactgcaagcctcagcctcctccttaaaataagggcatagatctgagatctctgaaatccctcccagctctgacattcacacagctctctcctctccttcaacacactggataaaggaaattacggttttcaagttctgtggttttgctcagagcaggtttttcttccgctgccactcctgagatagtcccactgaggtcaggtggcccgcacaggtgctttgttctggtcctcaccctcctcccacccgcccccttcccttctccagccccctctggcttctgcagcagggcttgcccacctctgagtgggagtgaaaagtaggccctcctgctcccctgccctggtggcctcttcaccacccaaggcttggccagcaaccaggtgaccccgaagcacccggcctgacccctctgcctcccaaaacaggccattctccctgtgctgcctgtggccagccctgacacccccacctggcggtctgggcggtccgcagtaggcctccacctgctgagggcattgtcagcgtcacctgaaagtcaccagcttgccggaacattcttatgcaaagacatgaagaatcaattataaattcacaggactgacgtttcactaatcatggggctaaaactccccagggaggaaagttccctgttccactggcgggctttcatttgcattttaagacacattaatagaaaacgacggaatgggcttttctttgtggcactgtggtagtaacaccaccaccaggctccgaatgtgagtcttcttcctgtattgctgggactcagtacagaacatattattgcatttcaaaaatacttttacaatggacatgatttaatttgaaagttcagcttaagctttcattttcatgagttaaaaaaaggaggcaaaaatgttgcaattaaagccaagccaagcatatgcactctcttgccatctagtgagcatacagggtattgcaacagtgtgtgatcttaataatatggggtatcctgttaattaaattatgtatatgggctaacaatgagttatttaatcagccatttaattatcttgaataacatttttattacagtgaaataaataccaatttaacttcttagcaatgaaatgtattcatacgttttagccctggataaatctgcatgatatgctataatgcacagtggcatgtattataaagcattgaaaatgtcactatcttcactttttaaatacttcttcctctccttaggcctcactgtagccttagggcacctgcactggcagaccatatggatgcaggtgcctgccaccttaggtggcttgggccccccctcccccgggtgcccctgggaggccacttccctcctggtgtccccacagctcgccagtatgcacatcagaacccgccgtggctccgcacatgatggaaaggagcacgcagctgcatcagctaccttccgtcttgctgaaattagactgcagaagtccttgctggttgcagaatggttgtaaatctagtttcacggcctgtaaacacgtgtggctgctgaaaagaaatggtgaagattgagctaaaatagacttgtccctggaagtaagtcattcatgtcctttacaaaagccaaatccacaggatctggagagtaggttaagctctcttgaggagcttcttttggccattttacctgtgaagggctgtttcctcttcagtaaataaagtcattaagtaaccgtcaacctaaggaaactttgtaacacaatcccaaatcctcatctgctgtattgacgatgggccccctgaagtgccccagaattcttcccccaactgcagcccggacacacagacacgtgtcatgttcacacctgagggactggcgagcgctactgttgctgagctggtgggagtggctgccggcgggtgcaggggcccccgagatcccttctctgccgcgcctgcccccggcctggaatccagcttcctctcacacggctcccaggcctgtgcacgtgctctttgggaagagccatgcctaaagtaacttcccatcaaagagcatggcttggtttcgtaaaaacctgtcttttgtcatactagattatcttcagaaacactgacccctggccctgagcactgaaagagcggttagggtgatgcggctggccacggcatcgcccactagcagtgagtgctgcgcccccaccacgcccccaccctgcgctctctgtggtggccgcctcagcctggagcatcagtggcgtgagtggggcactggaatgacccagtgacactgccgggctgataacaagaaagtcaaagcctgccttttgtttacttgaaaccaaaggtgggacatgtgtgggattagaacagacattgcccagcatgatgggtgctcggaagcctacttccttccccagagaagcctaggggggcagctgctacttttccccgagctggtgcaagctggtgagtgcagcctctgttggaaagcagggctgctcccctaaacttctcagatcagggccagcccagggtgtgcaggccccacagctgcatctggggtgccatgtccgtcccagctgcaacctcagccgccccgagtgcccccatgccaggtcacaaagccctcccctgtgtgagggagctcacacacacacgtccacacacacacatgctcacacacacgctcacactcatacacaatgctcacacacgcttacacacacatgctcgcactcgcacagctagacagcagagacaggcagcaggaaggcgtgggaaaggagaccgaggcatgtgctgtctggctcgtcatgggcgtcaggccttgaataaaattagttttaatgagctgtactcgaaggtactagactggagagagtcgttttgggttttttttgttttttccttcctaccaaactggaattgtacttgtctgtctttctttgtaacatcccaattagcaagccagtaactccagtcccagtttggaggaaatggaacatgtagaagaataaagaaataaaagtacctctgggattatacgatgagtaagtaagaagaaaaacaccattggtggccatagttactgctgaccgcgtgcttatagctaagtgcgagaatgcaggggagcatttagtgcagggcctgccgcacacagctcgctcaataaatgcggcgatcactgtcatcctggagagagcccgggtttgctggggacttgagacaagctaccactgtgtcccacgtgactttggcaagaccttcctgcacggagaccgcgttgctcacacctggaaagggtgactgggtccgctcagcgtccagcaagtggctgtgatgggccggcatgagtgggcagatggacagtgagactgtgctgccaggccttgcccttgaggaggggccacgggccagaccaccacaggcagggcagagcgatgaggaatccagcaaaggcctttggcagaaaccagatgccctgagcacggcagctggcacagcgctcctacatgttcccccgtagctgtctctaaaacgggaaggtctcatgcgtgccgcacggagcacacgacattcacgcactctgcaaggccgacctccatcacatactcagcctcagcaaacttgttttgtggtttttctttacatgtaaaggtttgaccttaatttctagcatagaaaacgtttaagagacactttaaaaatttggcctatgtatttggaggatggagatgagacagcgttcgccaactcacatgataactttgtcaggaaagagagttaggtgcagtccaagtgaaatatgaatcgctgtttagaagatggaagcaggaaacagaccctcaggcccaactaaaccgcgacagcccccggtgacaggcaggaccccgccgttgcgatgcgcacagctcagaatcccggcccgactgcagtcgggagagcagccgccccctggcagccgagcaccgcgtgctggtttccagcttccccgccagctcctgcgtcagcgtgtcctctctctacaccgcgtctgtatacacttgtgctcttctacacgtgtgaaacccacagtgctgttctcagctctaaagtacgttgggtttttcttcccacaggattatgtgctggccgtggaggcgtatcattcggttatcaagtattacccagagcaagagccccagctgctcagcggcatcggccggatttccctccaggtacctgtgcacggtcagacatgagccagaaaggccttatgatagttctttgctcagatgggcgactgtttgcttttaatcattttaatataagaaagactgcagaaaatattccaattcaaatgtatgtgaccatgaaaagggtgggttctttccaggagttctggtttgactgtgggaggccctgctggcttttgtgcctgttgctaaatgtgaacccacagaaagtgtcatcgcagccacactgaaatgagttactctagacattgtcctgctgcagttacgaaagcactgactaaaccgtgaggaatctcagttcagcttatcccgtaatagtcactcgctgatattttgcctgaaataacccttgaatcatgtttgctggacagacaaagtccagactgaacagtggtctcagtaatgcacaaagctcggcaggaccccctttgctaagaatgtccttgaagctggaatgcattttcctggaatatttggtgacagggaggtcacagggagtgatgagtcccgcccacatccctgtcaatcccacccttgcaggcggagcacagggcagcttctgcccctctcaccctcagtcttaggtcacgtcccaaacctgggccagggaaaggaggcacgagcaagggacggctgagcagggagaagcagcacagaccttccacaggcacccactcacggtgagccaggccctgcgctgaccatttcacctcacggtgtgactggcttgttttacagatcagcaaactgaggtctcctggttaagtgagatccagctacaggaggccacatagataatggggaagctagaatttgaacagggcctctgtgaactcagggcctgcactctcagctaacagctggtcctctccccctccacacagttgctcacacatgcactgacacacgtaggcacacgtgcacacaccatttcctgcacgccgcctgcttgtggaagtccacatgggacaccagatagtgttggaggacagccctgtccatgggcccctgtggtggggcacagcagatgactgtcactgaataaccccgggcaggcacagatgcgtgacgcgtgagctgccaccatgggcatcggctcctgcctgcactaggatgcttgcagcaaccctcgttacctgtgtgagaaagctctgtgtggccaggatctccaggctgcctcatgtgtaacattatcccctggttatcatagtaaaatagtacgctgggcctgctcagattcctcactaccctggagacaatctcggaaattttatttcagagtcatattttgcacaatttgagaagtagatgctgaattgcttttgcgtctggaagtgcttctccttccagggggagccactggcttgaccacagcgagggctctggcaatgaggctggagtctcaggagggaggctcagcttccacagtgtgatttaagccccatctggcgcacagaatgtgctaaccaggctgcaagggaagccctcggtgttcgcttttctgaggacatggggaggtgatagcggcgctgtgggcaagagcttttgccaaaggagaatggagaaaaagacggaagcacccaggccgactggactcaccgacgccccacacaagtgcctcgatctgcatctcttgcaaattatttatcaggcctcgctcacgggtatttttactgttgctgaagagcaaggtctctgaattctgtttttctaaaggaaatggagattgcaatacctagctatttgggatatctctgaagacgttgtgacgtggctgctacagaacttctcagacagcctcgcgcagctgacgactgcattgccatctgcacatacagaaaacccagccccagtaagttccggcttgggcaggtcagtgtgttgtctgaagatgctggatctgggaagaaggatgaagcaggcaggttttgcccttgaagaacacagccatttgtgggagtcaaggcccgagagcaccgttgtgatcagcaagaacgaccacatatcagcccagtggatgcccgagcacacagcagacccccacccagttctgaaacactcctgggtgcacctggacccgccctctccagacctctcctgtgttgggacctctcctcatctccgctgggttcagcagagggttgcagaggcgggaccctgtgtgtacacgtggtgctgagctgccagagatctcagcacgtccctcgtcccccgtcctgcgcgtagctgccattagccttccgggagtacactccaccctgccgtctctggtcagaggtcctgctagggccttgtggcctgtcaggtgagcccacacttaaagctcacattcagagccctagctaaccttttccagcccagtgttcttcgcctcatgtccttagtcccaccagacagttgatttgctgttgcccaaacgggaccacacttgctgctttgacctctcgtgggctgttcctgctgcttagaactcccttctctttctgcttgtgcaaaccctgcccattcttgagggctcactggaaggacttctctaaagtcaccccagccctctcagcaagctctcccttccctcttccccaaggcatctacgggggataaaagcacagggctcaggagctggggtttggaacaagacagaccccgaccctggcccagctgctcaggctggcgtggctctgagcagtttatctcaccttcatggtgtcagtccccccatacaaccgcctgccgtgagcagtcatcatcgtcgtgtgtagatgataaagtttatccatgtgaaatcctctgtgtcctgcctgggacatgccaggagcgctgtaagcgtaacttgctgtctttcctatgtcttgaggatgggttgtgtttgttccgttcctcacagatccaagtgtaagggcggcattcccaggtctcagcaaaagtacgtgtgctcagaattgcccttggaagccccactcccacggcggggcagccaccccatagagtgactccagtgcacacgtgggcacgaggccctccaggatgggctgtaggaaggggcaaaagccgtgtccccacgcacgtatccggacactcacaccccacgcgccagcctcagagctcctgctggcgcaccctgctcacccccaatgccgcatctcagcacgggatggaggacgccacacggagtcagattgcggtcgatgagaggtcagtggtgcaggacaagatggggttgaacggggactcgagtccagcagaaacgcctgaactaaatgtagacagaattgactgcgctctgttttaaggagaaagaactcaaatggaatgaacacgtaaaagccagcagagagctctgttccgaagggacgtagcgctcaatgcctactttaaactcagagtgttcagccacggttagattcttggagaaacagccctcagagaagtcactttcaagaaagcacgtgtgttttccagctcttgcagtgttcttctccctgaagcacctcatcagtacctgtatcttaattatacggtctctaaactggctgtgtgtgagccattctgaaatgagttggtgccactacggaagcaaagaagtatcacatgcactgtcagcacctgtgtgctgtgctgtcagaggggtaaatttcataagaaatacgtatattagtaactgtccctcaaatggtaaaataatactgcaggtgcttagaaagtacgggacgaggttttggttgcagtcagtggaatccgcagtggctgctataagcagaaaaagtttattcacggacagtagtacagggaatcttcatgagggcccagagacaggccattctagagccacaaagccaggatgccgtagcacgtcacaggcccctccagcaagaatagcactgccagctctgcctggcatctcagagtcttgtccccaccctgcagacccaggtcccccacacggcctcctgcttccgctgcctcctcaggccatgtcaccttatgtgcgtgcatctctctgggggcccaggctgcggggttgcccctcctgcaagagtaggaatgtaggcctcctggttcctccttgaaaggacccctgacaggtgggaaatggacagaatcggggaaggcagggccagcagcagtcatgagcatcccttacaaatcacattgtaacatctgaagtcatgtaacacaaagctaaacacgcgtggaataagattgatttcgtttctctgagattagtttctactcttatgtgcacggagatacaagggaggctcggcattttctacaatcttgaatgttatctccagaccagggaggatttgggtttcatcagcattgaaggtgggagatgaggtgggcatcgcgtcgatgctgagtctcggggagaaagctaggaaatgtccccagcaggtagggaaacgcttggcaaagcacaaaggcagagggacccacatagctgggcccattctgctcacgccctggcactactgcaagaactgtggttttccgggtcaaccctagcgaggagggagcacaagcagagcttctctgcggagaaggcagatttccagctcctaagaacaccctgttccacaaggaagctgacgtgcccctccccagggacccacgccaaaaggccattcttccaggccagcgtcccagggcgctgctgtgcgtggttcgcagccccggcaaacgatggcctgcactgcgtgctgtccgccctgttcctgctggactctctgcactgtgtcctgatcaccctctcagctgatagtgggcactgcagtgtgaatcttctcatggacaacagaccaatcctgcctccaccagtgccgtcgccaaatcagtaacacagagcaacctcaaacatttctgaatgtttaggtcatctaatacttggcaaaagagtgggccgaacacctccaccctcagctttctcttctgtttgtgtgtgagtgtgtgtagcagagtctgagaaagatacatacagccaccttccttttctgagcttgggaaaatttgaacaagagcactgaaatgcaaacactaatcaaaaaggaagtattttccattttaattctaaagagtggaaatagaaaaaaatgattttgctaaaacaaaatatgcagacacctttgggaaaacgtgctataaaggaaccatgctaactccagagatgacccagccggacagaggtgaaaggggtggacggacagcaaggttctagatgattccacacagttgggctgagaacactgtcaccgcacctcctctttgtgtttaaaattttgcattgaatgtaggtgcctctgaaatatgcgagctaaaaataggaagctcactcactgaccacaccaacagttgcccggtcacacgagaagatacactggcgaatacaaggatggcacagatgccctcactttgtgttaggcctccgaggagctgactttcaattttaatatttcaaaacgtattctacttttgaatagcaatccttattctttccaagaaattcatagcataattctgggcactgagcaaagggtcacctgttcggtttgtgtgctgttcacattccagctggaaaccctggctcaaattacagaattgtacttggggtttaatgcctgcatataagggaggatccatctcccccctcggcctcgtcccgcaggcagaactatcatagccacgttccctgccaactgtcagcgcacccgccagacaggtgacagccgtgtttcaaaactcacatgcctgctgtgatcatttccacagtcccttcatcttcatcacacagagcctcctttagagcaccagggcctccacacagcaagggggctgggggttaggaggagagagaatggggcccagtgggaatttccagttctgaaggaaatctgtgttgtaagcgagattgaagacatttgtattccagaggagtttctcacataatctaaattaaggaggggcagaagcaactgatcttcaaacagaagaagcattatattcatacttcttaaaattacttcactccaacttagattccacctcagaatctcttgacttgggtcttagagggtcctcactgggacttgggactgagagggtcctcacttggacttgggtctgagaggatcctcacttggactgggaaagtagctgtggtgcgcaggtgcaagtccagcagccaagcacagacgaggggcctgtgcttggcattggggcagctgagcgcagggtggttctgcagtgtctgtggccagtcctaggcctcggtgtcctggaccaaaggtcagagcccaaggtgatcaggcaggagaaagcctcagccactgcaggagtggtgggaagttgggataaaccagccaccccaggcaggacgaagggggacgggatgcaggaccactcaccgctatggctgagaggacctcagcaagaaccaaggtcacctctgaccgagttcccagagagcaggaacccagggcagggtggggagacgctgaggtggaagaagggaaggaagggccagggaagcgctgtgaagctgggaaagacttgagcacgttttacagaggggcacgaccccaggctccaggaggggtgcgggcaccttgaccgtctcgaccaggagggtggttttacgcacacagccacgtaccagcatccctcaggttgtacgatctgaagacatgcaggttcctgtacatcagccatagctcaacagagaccttcaaatagaaaaagaagagactgacgtctggctgccagcctgagccgtggagtgtgctggctacagtcagggaaagagtggggagagcgtcctccagcccctgccaccctgtgaggcctcatcatgctgatgtgacaccgaagtgcaagcaaaaagaaaatgtaggtaagtgggatttcaccaaaactaaaaactgttgtgctttaaaggacaacataaagaaaaagtaaaaagacaacctatggcatgggagacattgcttgcaaatcccgtatctgataagagacttacatccagaatatatgaagaactcttacagctgctaaattaaaaacgattcatggcactagcatgcagcaggggagagactggactcaactctgacttcacggaggacaggtgggaactgacaaccagggaccagggtcagggtcagcgtccctggttggaaaatcacccagaggaagcatcaagaaggggtttctggccaagcagacttgataggatcgttgctgacagccggccagggtggtaggatctccaggtgctaagacaccgagggcggggacttttcttaaactgacttagcaggattcttgctcacactggattctacaaggacagagaaggaaggcaaggtcaagcttgtctggtagaggaggcttctgcacggatgcagcctaatttatgcattgacagcctgcctggttcccagcaggccctcgggttctgcagagagagcaggtgagggggggtcaggggaaaggagagcacccctggggccggctctgctgtgctcacgccgggacgggaagaggagctggtgaaggagaactcaagaaaaacatggaagagaagctagggtactctgaaatagatcgcatctttcttttattcgtttatgtacattagcctggggggatttgcccagttggaatggaacagtttttctgataagctttaaaatacaagaatgttttataacataaaaatttagactaaagttttccgtgttggtttttgggtagggtttttctggtgggtttttttgtctgtttttgagacgaggcctcgctctgtcacccacactggagtgcagaggcgcaaatgcagctcactgcagccttgacctcctgggctcaagcaatcctcccgcctcagcctcccgagtagctgggaacaggaatgcaccaccatgcccagctaagttttttgtagagagggggtcttgccatgttgcccaggctggtctcaaactcctggcctcaagcaatcctcctgcctctgcctcccaaagtgctgggattacaggcatgagccactgggcccagctgaaatgagttttctgtatcaattgcagacctatgcttctgtgactaaagttgatcagtggtaaatatgaaaagaactgggttttctagctgactacagatttaatatcatctagcaacctatgtggctgttaacatagctgttctgtctttggatggtttaaaatcatctgactcccacaccacagagaagaatcattcttgccttcctctccagtcaacagctcacagccatggactgcaggacactccgccttgagaacactttaaaatggccattgcccatctgtaatggcttccgtgccaccaaggtggtgaggaatcccaaaactgtgacagagaagcaggtgaaggagctgagaactggagctctcccccacccctcagtgcctgtattagttggggctctctagagggacaggactcatagaatagatgaatctatgaaggggagtttattaggagaattgactctcgatcacaaggtgaggtcccacaatagctgaggagcaaggaagccagtccaagtcccagaacctcggcaagtctgctctttccaacttctgcctgctttattctggctgtgatggcagctgaagagatggtgcctacccagattaagggcgggtcggcctcccccagcccactgactcaagtgttcatctcctttggcaacaccctcacagacacacccaggatcaatactttgcatccttcaattaaattgacactcagtattaaccttgacagcgcccaaggaggggagggccagacccagcgcacagttccagtttctgccacggaaacactgaccatgtgttgctcttaaggtcggagctccagggcggcgtttccccgggtttctgcgtttataagtgatgttagtatctggtttgcgtgtgcacaggtgacgtctcaaaaggatatggtggctgttttctgtcttcatataagttagaagcttgctttctctctctctggaaaacttgagtaatgtggaatgatctattccctgaaggtttgagtattcacctaagaattgcctttgctgagcacatgaggtgtgctgtgtgcttttcctaatttattattatgaatctgccttagtgttgtgtgcctgaggatttttctgtgtttctgggaaccattttggtaactgagagttttctagaaagccacctgtttggtccctgttttctcgtggattcgcacagagtaaaagacagtgctcttaccattatttccatttccttgttctgcctgtagctatttctacttttacatttctgtttatgcttcctttttctggattagtttatacactgttttttgtctttttctttgtgagacaggatcttgctctgtctgccaggctggagtgcagtggcacaggtatgattcactgcagaactcctgggctcaagagattcacctgccttagcctctcatgtagctggggaccacagtgcttacggccacacctggtgcttacggccacacctggctaattttcttttcttttttaatggagacaaggtctcactttgttgcccggtctggtcttgaactcctgaaattcagcgatcctcccacctcggcctcccaaagggctgagattacaggtgtgagccaccatgcccagccactgtatttcctttttaatagtgtcttttactgatttgttttctacatattctggaatacttttaattgcatttttatgtttaattttttcagttgctcctaacttttagaaatcggtaggattttgtatcctaattacattttaataattctgaaaatgtcaagttactttctaatcatcaggaaagtcagtgggtagcaaagaatatcccaagatttctctgttatcttcctctgagacattgagtaaagtcccatgccagcctcaggaggccttgcagtgcggaggatcagcacacggtctgggcgttggacagcctgggtgttgaccacagtgttctgtgttagctgtgtgacctcagaaaattgtctcatctttccaagcccgacgacttcatctagaaagcgaagctagcgacagcatctgcatcccaggctgtcgcgagggtcaggcgagctgtgcttgtaagcgcttgccacggccgccggcacacgttaatcttgatcggtcttgatgatgggctgtaatcatcttcagttcagtgtctcacacggtcctgttagacaggagatgcaggcgttcgagctgagggccgcgtcacggagcccatgctgccttcggtttctttttagtccgcaagtgggaaatcgatagtagtggacttcaaacggcttcggactgtgcagacgacgggcagcgatggacagatgccattcagtgtgtggtgtgtgtgcacgcctgtgttttctcttgtttcattctgttttttcttccccctcgtatggtatttcttttgtgggataacagcaacagttgtgaagggcctgagatgttatcctgtttccaagctgtggagttagctgccactttcatggatgctggcaaaaaatgtaagattcctacgttagagaggaaggctatttattacacagcaacagcagtacagccagagtggcattcttcccaccagccacggggccctgattcctcagggtcttcaccgagggcctcatgaggcctgcagtgggctgtgtggctggagaggaatcctgaacttagaacacccaaatccttgctactgggaggcgagcctgcctgccctttgccccagagggatgcagtttagcttacaaggctgtcctctaaacaggcatccttgtgtaaatgctttgaacaaagccctgtcactgtctgtgcttggaagacatgcagaaacatgacacccatggagaaccatctccccaccagtcatctgagaagttagcaggcttgttttaatgctggacagatgcttggcgtggacagtctaagagttaactaggctgctcagtatgatagtgatgggtgccccagccctcctcatggaggtgagccgcgcacattcagcttgtttctcatcgagacagaggacagcattctgttaagtttctgctgctgccatgataacagagctcgctgtcacattctggctcccgcaggctgtgccccggacacaaagcaactctgtctttaccctcgtgagcgcggcttgggccataataggacttttctttcatttgtatctatttcttattgtaagccttagatcatttattcccttccttacacttctagaggtgaaagaaaacccaagtctgcctttgtaaaaccaagctgtggcctcaggagtcagggctggggcactcagccttccaccccccaggcctcctctgccacaggcctgctgcatccggctgcatttcagtcgggcagccggtgggtttcctgacatgcgtgataagagtgggtttgagtttggtttggcttgttttttacagttgaattctatattatttggtcaaaatattactttgcaatttgcaaatgtggtggcacctaccattttactagccacaagtaactcataagttgacttaggacctgctcatattataccaatattttaagtattttatgtttcatcttattagttattcattttattttatctaatgctctgccagaattcattccaaaaggtaaaaattactaaactataagactcttaaataaggcgtgtatattagcaacttagtttctgacatatagaacattaacattccactgtatcttaaatgtcttttgcctttttattaaaaaatgattaaatggttactgaagttttcctctgcctgacatataaatgtcttcatattctaacatgatattagggaactaaatatatgagtatagacttaatatttcttttgtcaactaaactgactaaattttgtcaaagcagattggagacataaaaacagctgaaaagtattttcaagacgttgagaaagtaacacagaaattagatggactacagggtaaaatcatggttttgatgaacaggtaaatattttaaaactaaatatatgttttctcaaatttcccagaggcgttcaagccccacttactgagtcggaaagctccctagagaaggcacttctccctgtatctcctcttgccctgtgtctctcagagcggagacccaaggagtacacaggtgttttcttgaatcgcagtgatgttcttttagtcacagaagctgatttttaaggagctattcccccttgttcttcagagaagcgcttgtattgcccccgttttcagcgtatgtgtgtgtaaaggtcaccattgcttgcgtagcggccgttctggatcctgtgctctggtgttctgtgtctggatcccgtgctctggtgttctgtggtagaacgcacagcgtcgtgcgagtgcacgttcgtgaggaggaaacacgccttggacaaagcctgcagccaggatcagaaagcgtaaataaagcaggtgtccgcttttagcaggaagtcatttaggtgaagttactctatctcaattaacaaaaactagagtggcttggccgggtgcagtggctcatgcctgtaatctcagcactttgggaagctgaggcacgtagatcacttgaggtcaggagtttgaggccagcctggccaacatggtgaaaccccatctctactaaaaatacaaaaaattagccaggcgtggtggcagtcgcctgtaatcccagctacttgggaggctgaggcaggagagttgcttgaatccaggaggcggaggttgcggtgagccgagatcgtgccactgcactacagcctgggcaacgagagcaaaactccatctaaaaaataaaaataaataaaaactagagtggctttaatgtgcgagcctgaatgcaaaacgcagctcaccgcctctacctggagatcaggaaccccgggccacacagggccatacgctgggtctctgtgggatccaaagcccctgtgggttgtgttgggggacagcagctcctgggctttccccgctaactgccaccgttgcttgtgttacagcgcgttccttcacctcgggcagaataactttgcagaagcccacaggttcttcacagagatcttaaggatggatccaagaaacgcagtggtaagatccccaagctgtaggatcctccatcctctgcctttcacagacgctagaaacatacacccacacacgtctcagcaggggcctgcgctctctctctccagtccaccagctccaggcagtggctgtggcccttaggggaagtgacccaacagggccacctaggctctgcccagcagctctgcaccacccccaggcccctaacacggcccagcacgcagcctggaatgggcgggcgtctgtcctggttgtgtgggccaaccctgggcgtgtgctcctccctaggccaacaacaacgctgccgtgtgtctgctctacctgggcaagctcaaggactccctgcggcagctggaggccatggtccagcaggaccccaggcactacctgcacgagagcgtgctcttcaacctgaccaccatgtacgagctggagtcctcacggagcatgcagaagaaacaggccctgctggaggctgttgccggcaaggagggggacagctttaacacacagtgcctcaagctggcctagctgcctccaacacactacgtcagaaggacccgggtctttgaaactgtgtcttgaagctaatgtattaatgtgacatggaggaactcaataaaactcctgcttcactggtgtctgctgcgtgtcttcttggtcccaagccacggcccagcccaggactgccccgcagttggtcggcgttcagccacgcagtccctgcagctgggtcactgttcatgaatgcaaggggcaggcgtgctgggaggacacagctcgtagacaggaaatctggagtcagcctcggggcctctgttctggaggccaatcctgctttgctcgttccttctggacatcctcagagaaaagctgggaggtgtggagaccctctcgccgtgcacctgcacgtacagggagatttacaacagggaagacaccccccacagatcgccgctcatgctcctcttgccctccccacacacccaaaactaagtgcgttggtcttacccatccgagtctcctccagcctgatgccagccaaacgacccctgccagcctggcggtggaggagaggccatcactgtttctcccatagtttatacatccacgtggagagtgagctgagtggaacaggaagcacgacgcataatgaagcacaggaagagcgcgtaaaacgcaggcaggcaggggctgggggtggttttgaagccagacacgtgttttcatgtgttctctcatgcctgaaaggccttttgcccttacgtttacacagttattcctgcttttgaagaacttaaagtacctgaaaatgtcttcactttacgaaagaactctgctaagggttctctaaatatctagctttgtggatagttttaaatataattcattttacagactgtgatataaacatttgcacaaagcgaagccatatttctgttaatttttgtaatagagtagaaacatacaaacactgcatctaccagacagacagtctcagcccatttgctgacatctagattaattatgcattaaaagaaaagaaaaaagaggtgagacagccaaaaggactgttggacaccaaggaggtttcaagatctttctcttcaaaaagagaactgaaactattgttaagcccagaaagatgaagatgtaattagaagccctccaccttgagggtcttccttcaaatgtgacttcagggatgaagtgtaaggctcttcctctgctccaacctggcacctcactgcaggcatcttacaggatttgccagaggattatggagcccgtcctttacaggcccggggctcagagctgtccccggccagttgtgcaggaaagcagacagcagtgcccaggctccagctagacatgagcccggcaaatcagaaacagagatcaaagttccctagtaagctggtaagcctaaatccaccctccctcccaagccccacccccatgctgctggcatgaggccaggccaggtgacagtatcattgcctcgtttcttgcctggattatttcttcctggttttgttttgttttgttttgtttttgagacaggatcttactctgtcatccatccaggctgaagtgcagtggtgcaaacatggttcactccagcctcaacctcctgggatcaaacgattccccactctcagcctcctgagtagctaggaccacaagtgtgctccaccacgcccagattttttttatttttataaagatgggatctcactatgttgcccaggccagtccctaactcctggcctcaagtgatcctcccacctcggcctcccaaagtgctggggttacaggtgtgagccatggtgtccagctaatttttttttcctactgcctgtatgattgcagaattttttgttttgttttgctagaagaggaaaacggtgctgtgagtgtctataacgtctgggacaattgtagcttatctagtttacacttagcttttctttatgttaaaaataaattatacatcccagaaatcttttctagagccaagtgaagtgaatggctaaccatcagaaagcttattttctaactggaaaatgggaactcgctgagttgatgatgggctcacaactgtggaaatgcccaccctggaatgcacagtggagaatgaagaagccagtaaccctgatggcatcgttaccgaatggccagggtgtgccaggcggcaagggtggatttgctccctgaatgatccatccagctgaatcttgagtcattccgcgtttgccacgaggggcagtgttagatcagtggtcctcaaagtggggtccccgaagcagcagcaccaggttctcctgggaacttgacggaaatgcacatcctcagccacatcctctgatcacagaggagtcaactgctggggcctgggctgggccggcccgacagtgtcgtctgcaccgccctccaggagcttctggtgctcctgcaggtgtgagaacgcatgtcagacgccggaggccacagacagaattccagttacacagcaggcgttggagcccatgggcatcgccatcctgccttacactgctggcctcttctatgccccctcgaggattgtgcccccacttgttctctctgcctggacccctcctggcatgcaccttcctagtccctattcagtgtcaccccctgaagcctgccctcaaccccaggacagtgcagccccgtccacactccccttacctcttgtcctggacccacacaggctccgcagcacctgctcctggcacggccccacagttgcagtacttgggctggagctgccgccatgaggtcctccttcaaacacccagttccagcgttccccgggaagcttcccatgccatcttgtcacgtcttgcacccagcaccgagggtgaggcccggcaaagcagagctgcaggggctcagctgtgtacaccacagttcttgagacgcccacctgtgtgtcctccccgatccgctccacaggtccaggcccaggcccagaggtagcccctgcgttcccgtggcttcaggcacacgtgtgcagacatgacgccgagaacaccggctttgccaccaaggacagaagacagtctgccccacccggggtcacctgcaggtcctgctctgaccagggtccaggccctgattccagggatgcgacagcacccagaatgtcctgccttgtgtggcacgtgggaccggggactcgggccccagggctcccaaccctggctgtggagagtgggtggctccgctgctggtcgggggcactgtgtgggcagacagcgtgccagtggccacaggatgtcctgacagcagaggcgctaaacactccaggagcgcctcagccccaagctctggttccaccccttgcgggtgagggaggcccaataacagccagactccatcagttcagaggcaggggctagagatggatttaattcaacttaaaaagaaatacaagaatggaccttttctgcagtcctgagggagtggacaggttgcgtgcgtgctctgacggtgggatccagaccccctcctctcctgcgttgaaggtgccaccgggcctcatccccagccacatcacatcctgagcctcttacaggcaggccccgaggtcctttcacctttctcttctctccagtgcttggtgcattttcaaactcagtacctttcttttgaataaatgagcaagaataaacccggtgctgcttgccgagctcctctccctgggcggggaactaaagcaaaaccacgctggatggggtcccaaacaccctaagaaggccgagctcctgccgctctccagcacgcgcaccgaagaccggagggagggcctgtcgctctcctgcaggagcacgagtggagggagggcctgcggcgctccagcaggagcatgaggagtggagggagggcctgtcactctccagcacgcacaccgaggagtggagggagagcctgtcgctctccagcagaagcaccaaggattggagggagggcctgtcgctctccagcaggagcacgaggagtggactgccggcccgtcactctccagcacgtgcaccacggagtggagagagagcctgtcactccagaaggagcaccaggagtggactgcggacccgtcactatccagcacgtgcaccaaggagtggagggagggccccttgctctccagcaaaagcaccaaggatcggaagtagggcctgtcgctctccagcacgtcccccccccggcagtggagggagggcccgtcgctctccagcatgagcacccagagatggaggaagggtcagccatttgtcaggctctgcgtgtgaaaagctgtgatttcatttcttatcagttattactgtcactatcactcaggatgaaattggcctcacccgctcaggagcaatgctgccttctccctgtcctcctcctggattgttgaggaaaaagccagactaacctgttccacaccttggcatcagttgcataaatgctatctcagcatgttctagaacacagtactgtttaaacaacgttctgggggtaaccaagtttataacttgcagacccgatggccgtaaagcatggggggtgggggggtgcctgcctgcattgcagctgtcagagctgcacagagcctgcgacacccagccatggcttctgcccaccaggccacgtccctccgctcctctgaatccttccagttcttcttaggccacttaaacgccaccgtctccacgaagtcctgtcggatcaccctcataggaagtgacaaaccacgttttgaacccctctccccacccagcaagcccctagcccgcgagcataggatttcctttctagaacacgtgttctgtgaagggccagaggcaatatttgaggcctcgtgggccacatgctgtccctgttgcatatccttttttttgtttggtttggtaaactgcttaagctggcagaacaacagaacccgcacattctccacgcagcccagcgcccttggccatgcagggctgtgccttctgccagctctggaggcccaggggctggcatgggcctcccgtcctgagccccccatgtacattgcacccatactgggaacgcccccaggatctgctgcgagacccccaaggaccagcttctgcagtcctggaagggctctcctgacccccaagtccgccatcttctgatggtggcaggtgggcacagtcactggctgagcgaccaagggtcagtgagattactaggccggcgctgcacccaactgaaatgaactcacgtgtcctcacaactcctagcagcagatgctgtcggcctcgcatcctacaggaaaggaaccatcgccaaaagacgctgaggaacatcccgagggtcacagggacagtgcagagccaggaccagcccggcccatggtcccccagcgtgcaccacctggcccggcactgtgtgctcagccatgaggactgggaagagtcctgcccacagctcaagtgtctacaccgcactgccatccaggctgtgagccgctgctgagcatggggaatgtggctgctgcagagacgttatgaaacacttctaaaagaatgtaaaagatctcattaataattttgagtacctgttaaaatgatagtaattttggatctagtagattaaataaaacatattattaaaattaagatgacctttgaacatttttaacgtggctactagaaaactttaagttacgtatgtggcgcccatttgtggctcccattctgtttctgttggatggtgccaaagaaaccaacacgtaaaagcccctgcagaggagccgctgctttgccaatggttagtggtcagtgtgggttctgccctctgggttcctggcaaccagggctgctctctgagggctgaggttgccacgggctaggcagatactggccctgcagccctcactctccggagggcgtggggcatgggatgggatgtttcagaggacgtggggcatgatgggacgggaagtttcagtgggtgtggggcatgatgggacggggtgttccggagggcgtggggcatgatgggacgggatgtttactctgctccatggccttacagtgttaagtgtaagtcagcattgaaagcagttttccctggaacatagaattctagttgatgcggatccagaaccacggagggtcctacaactgctaggctgaaggctgacttaccaaaggccacagagcatctctcccccagcaggttcctgtggcacttgcatgtgtgtctttttctttttcccccaaataattttccagttttattcttttcctttgacatagaagaacacaattaccgagagaagaaaaggaaggtgagggtgactgcgcgcctccccatccccacccccattcccacacggctcatttcaactctgggagggtttacaggtaagaatgtgaaaatcagaaacgtcaggtaacttttccaaggacccacagtttaaagcgggagagagggagggattccaatccaaatctaacagtgaggctcatggtggtgccacgatctgtgttgccgtttcacacactgcatattgctttgcagtggagagctgaatccacaggcagggccggacccaccaatgggctgccgtggataggctttgggctccagcaccacacacatggccacacgcttacacatacaacacacacatgcactcacacacggaggaccgtgttcacctgcgtctaggtcctttccgcctcgaggtttacctttattggacctggaacccgattacgggcagtctgttcccgcgtcgcccaccctcgtccgtgggagaagtgccatctccgggaccgtgttaggcgtccagcacagccagccaggctctccagcctcactccctccaccccagggccccgaggctctgcccaccgagatgacaccctgcgacctccaccctggctccttctggtcaccctgacacccactcctcaaatgcccacagtgagcctggggtcctgctgcctgtggagtggacccagtgcgtctccctaaagcctccagctggcttggcctttgtctcagcctccacctgcttcccggggtcagggaaccctgccagctccctgggcgtgctgagctggacagtcagcgaactgcatccctgaaccctcgcccactgctccaggaaactcacccaccctcagggctgctggaattcacatccgatgggtggagtttattctctgcaccccagggccccccacacatgtcaggaggaagagctgccctggcaccatgggtagactgcagggagaccccaggatgcggggaaaccccaggatatggggagaccccaggatgcggggagaccccaggatgtggggagaccccaggctgtgagaaggccccaggctgcagggagaccccaggatatgggagaccccaggatgcgggaagaccccagcatatgagaaggccccaggctgcagggagaccccaggatatggggagaagccagactgcagggagaccccaggatgcaggggagactccaggctgtgagaaggctccaagctatgggaagacaccaggctgtggggagaagccagactgcagggacacgccaggatatggggagagacctggctatggggagagcctgggcaacagggagaggccaggctgtggggaaacccccagatggggacagaggccaggctgtgaatgggaaactgcgtctgtttcctgaggctgccgtaagacactcctaagtatgagagcacagacctgattccctccccattatggaggctgccgtcagcaggccattcctagagaggctccttcctctcctcttccggcctctgggggctcccggtgcccttggcttgtggccacatcactccggtctctcctctggtcacacagcctcctccgtgtgccaaatcttttgcggagccacttaagatggtatttggggcccacggtaatccagaataatcttctcatctcaagatccttaagctaattacatctgcaaaagccctttttccaaaacaggtcacgtgcacaggtcccagggcttaggatggggccgtgaccttgggaatgatcagcggccaaccacaaacgcccactgagtagcttcctggggctgctgtaacaaggtgcccaaacagagcagcttaaaatagaactgcatcttctcacagtttagggggctggaaggctgcacgcgagctgcaggctggctgcattctctggaggctctgcagtggcgtctgtcccaggcctctctccgtggtggccatggcagtcctcggtgctcctggctttcggccacatggccccagtctctgcctttgtgtttatgtggcctcctccagtgtctctgtcttctgttcctgcagagacaacagtctttggagctagggcccaccctagtccaggatgattccatctcaaacccctatttaattacatctgcaaagaccatttccaaaaaggtcacattccgaggttccgagcagacaggaacttttagtggacgttattcgagcccctccacctcacagacaggctctggtggactcctcacctcaaccctgctccaagggtacatgatgtccccctttacagacagggagactgaggcacagcttgaagaacctgcccacggccacacagctactgcagcagcagaactggggtgattccatctgagccttcatccatgcagacacctccaagcccaaggcatccacggagggcttctccctcgtcttctccacaccccaagctcacagggatgtttctctgtggaggtggagcaggcaatgctgccctggggcctctatcctgggatctctggggccagcttcaatgtcatcatgggtggccgctggcccaaagtcctgctcagcagcagcagcagcaggacaggcctctggagagcatgcctctgtctctggccctgccagtggcgtccttgtgtccttggggaccccacacacacacattcttctgcagaggcaatcaataaagccggggcaccaaggaggcttcaggagtgattagcaatggagcaggctggaaaatacgccgacgctagggcagatcgtattgattccattgacttgccctttgccaggctgttgtatttataactcagatgaaatcctatttggattttagaatgggtgggtttataactcagatgaaatcctatttggattttagaatgggtgggtttataactcagatgaaatcctatttggattttagaatgggtgggtttttttgaacagttggtgcaaaataaacacaagcatttttaacatggacaatgaaacacattaaactataataataaaggcaggcaggcaagcacgtccatgggaaagtggtttcagtcgaaaagtaagctccaccccagaactgtcacacctgcactgctcacgccagggacagaccgtgataggagcacagcctcctgtcctccagcccccgcccagcccagcttccccagccccgctgacctgggggctgtcttcatgcctggatgcttctagtgccctgcccccgccacgtttaagagaatgttttgaaaaataatcacttcccaaggcagaaaacagagagcaaaacacagagcgattcagaagagccgcctgctcaggggtgccccggatgttatctgcaacctggcacggcccgactgcaggcctcagccctgtgccctggccccacctgagcaattcctctgccctcttcagggcccagccaggtggtcacagcaaatctggtcaggaccagggacaatcagcccgcagggacgtcctgcctcagccatccacttgatggtgacgactgccccgacccctctctctcagcagctgtgcctgcctggagcccccgtaccctcacccggccgtaagggctgctgcaccctctgctctcctcactggactgtggcgtcctgaggaacccaccagccactttcttatgcatctcggcactcaggggacaaaaccagctctcccggaggggcttgtgggaccgagtttcactgagagacatggtgaatggaagaacttcacgcatcatagcaggcagaggactccgggagcccttgacccgacccacaggtcatcttaccagtactag

SEQ ID NO: 291 - DNA, 2536 bp, Homo sapiens
cgaaccccatttccggcctgggggcagggcctcgggttcctgcatcgggcctgagcagaactaggcgcgccgcggcccggcacgcgcaggcgtacagagctgcccgggggtgccagttcctctccgattcccggcttctgtcaccttcctcacggaccttggtcacggccgcaggtgaccccttagcccagctccagtgggcgggtggcagggtcatggaggacgctggcggcggcgaggagaccccggccccggaggccccgcacccccctcagctcgcgcctccggaggagcaggggttgctcttccaggaggaaaccatcgatcttggcggagatgagtttggatccgaagagaacgagaccgcatcggaaggctcgagtcctctcgcggacaagctgaacgaacacatgatggagagcgtcctcatctctgactcccccaacagcgagggcgacgcgggcgacctgggccgagtgcgggacgaagctgagcccggaggggaaggcgacccaggcccggagcccgcgggcaccccgagtcccagcggcgaggccgacggcgactgtgcccccgaggacgcggcacccagtagcggaggggccccgaggcaggacgcggcccgcgaggtcccaggcagcgaagctgcgcgcccggagcaggagcctcccgttgcggagccggtcccggtgtgcaccatcttcagccagcgcgcgcccccagcctccggggacggcttcgagccgcagatggtgaagtcgcccagcttcggtggcgccagcgaggcctcggccaggacaccgccccaggtcgtgcagcccagccccagcctcagcacgttcttcggagacacggccgccagccactccttggcctcggacttcttcgactccttcactacctccgccttcatttccgtcagcaatcccggcgcgggctccccggcccccgccagcccgcctcccctcgctgtgcccgggaccgaggggcgccccgaacccgtggccatgcgagggccccaggcagctgcgcccccggcgtcgccagagcctttcgcgcacatccaggcagtgtttgcagggagtgacgacccctttgccaccgccctgagcatgggcgagatggaccggaggaacgacgcctggcttcccggcgaggctacgcgtggagtcctgcgggccgtggccacccagcagcgcggcgccgtgttcgtggacaaggagaacctcaccatgccgggcctcaggttcgacaacatccagggagatgcagttaaagacttgatgcttcgctttctgggtgaaaaagctgcagcaaagagacaagtcctaaatgccgactcagtggaacaatcttttgttggattgaaacagctaatcagctgcagaaactggagggcagcagtggacctgtgcggacgtctcctcacagcccacggccagggctacggcaagagcgggctgctcaccagccacacgacagattcactgcagctctggtttgtcaggctggcactactagtgaagttgggccttttccagaatgctgagatggaatttgaacccttcggaaatcttgatcagccagatctttattacgagtactacccgcacgtgtaccctgggcgcaggggctccatggtccccttctcgatgcgcatcttgcacgcggagcttcagcagtacctggggaacccacaggagtcgctggatagactgcacaaggtgaagactgtctgcagcaagatcctggccaatttggagcaaggcttagcagaagacggcggcatgagcagcgtgactcaggagggcagacaagcctctatccggctgtggaggtcacgtctgggccgggtgatgtactccatggcaaactgtctgctcctgatgaaggattatgtgctggccgtggaggcgtatcattcggttatcaagtattacccagagcaagagccccagctgctcagcggcatcggccggatttccctccagattggagacataaaaacagctgaaaagtattttcaagacgttgagaaagtaacacagaaattagatggactacagggtaaaatcatggttttgatgaacagcgcgttccttcacctcgggcagaataactttgcagaagcccacaggttcttcacagagatcttaaggatggatccaagaaacgcagtggccaacaacaacgctgccgtgtgtctgctctacctgggcaagctcaaggactccctgcggcagctggaggccatggtccagcaggaccccaggcactacctgcacgagagcgtgctcttcaacctgaccaccatgtacgagctggagtcctcacggagcatgcagaagaaacaggccctgctggaggctgttgccggcaaggagggggacagctttaacacacagtgcctcaagctggcctagctgcctccaacacactacgtcagaaggacccgggtctttgaaactgtgtcttgaagctaatgtattaatgtgacatggaggaactcaataaaactcctgcttcactggtgtct

SEQ ID NO: 292 - protein, 469 aa, Homo sapiens
MRGPQAAAPPDEPFAHIQAVFAGSDDPFATALSMGEMDRRNDAWLPGEATRGVLRAVATQQRGAVFVDKENLTMPGLRFDNIQGDAVKDLMLRFLGEKAAAKRQVLNADSVEQSFVGLKQLISCRNWRAAVDLCGRLLTAHGQGYGKSGLLTSHTTDSLQLWFVRLALLVKLGLFQNAEMEFEPFGNLDQPDLYYEYYPHVYPGRRGSMVPFSMRILHAELQQYLGNPQESLDRLHKVKTVCSKILANLEQGLAEDGGMSSVTQEGRQASIRLWRSRLGRVMYSMANCLLLMKDYVLAVEAYHSVIKYYPEQEPQLLSGIGRISLQIGDIKTAEKYFQDVEKVTQKLDGLQGKIMVLMNSAFLHLGQNNFAEAHRFFTEILRMDPRNAVANNNAAVCLLYLGKLKDSLRQLEAMVQQDPRHYLHESVLFNLTTMYELESSRSMQKKQALLEAVAGKEGDSFNTQCLKLA

SEQ ID NO: 293 - DNA, 107330 bp, Mus musculus
  misc_feature (1)...(107330): n = A,T,C or G
ttcacacactgcaaaggaaagtttcatttgacagtttgtgctactaggaaaatcaaagttccttcttagggttcttagtcatgttaattaaagacaaaaactgagaatagagacagaaaaaaaaacacacaactccaggacaattttattagtgtttagaataaaaactttagggcagtcaacctataaatcttggcagggagatggagataagggaaatggagaaggagagaaaaccatgttatttagaagtatctaaatgatgaacaggcagctaaggggctgaggggctcagagaaggtgacaccactaatctgtaaatgacctccagtgattccagcttccttagacaacccaacattctcagccacttaactcagtttaagagaagcaggatttggagagaaagaaggaatgcattccagcttgccttgaaaatgctgattgatatgacagaatgtctgagttagaagtgggcagaattccaccaatttaggtatgaaatattcaattagcttttcatttactattatgaactggatgacatccattcccctaagtggaaaaggacatcactgtgtcaaaacccatagaatacttttagaagcagaaaaaaaaagtaataataaatgtggtgccactgacaaatgattggtcacttttcctcattttttccttcctttatttttctttattattattttcaatgaattgttttatttttttgaattccaaatgttgctttcctcctctgtcactacaggagtaggtgcatcttcttccactgagaccagtcaagacagtcctctgctacttatgtgccaggggcttgggaccagcccggtatgctctttggttggtagcttagtctcagggagctctcaggggtccagattagttgatattgttggttttcctatggggttgccatcctcttcagttccttcagtccttcccctaactcttctgtaggggactctaacctcagtccaatagttgactgtatctgcatctatctgtctcagtcagctgctagtagagcctctcacaggacaccatgctaggctccttcctatctgcaagcatgacatagcattggtaatagcgtcaaggtttagtgcttcttcccaacccccatgggatggattcccagttgcaccagtcactggaccgcctttcctttagtctctgctccatttttgtccctgcatttcttttagaccagaacaattctaggtcaaaaattttgactgtgggttggtgacccccatccttccactgaggacactgtctatctcctagaggtggtttcttcaggttccatctccctactgttgggcatttcacctaaggtcgccctcattgacgcctggtagcctttcatagtcacttttcttatgagaacaataaagactcctggtgtagtgatgatttggctatcttttcctagtaagcttacatcttagaacaacttgggctttggtgaagtgatgatgggcttcatcaaaaatgagccccactgccgcttagctctgttgtctgtccctcaacaggaaaatctgactgagctcgagaagttcccctgagaggcctctttctgttttatgtctcttttcttactttaggatcctgacttggtggtatataccacagtaagtaatgtagacaccagaaggtgcttcaggattcttgagtcaaagtaatatgataataatgaaagtagactggtttacatgtctacacttcacactagcttagaactcaagagtacataatacatgcttttcaggtgcaggcaatttgagaattaataacagattatttttgaccagggattcagttaaaagattcgccagaactcactggtctacaaagtgagttccaggactatacagactacagccagggctatacagagaaaccctgtttcgaaaagccaaaaataaaaaaaaatttaaaaaaatgagagaatatttattgcattgataatgctgataacaaacaaggtaagtgaatgatattttttgttttgtaagattgacatgcaagaaatatcccacattatttcaggaaagaacaagagctattcatagctacttaataaacgttgtggctttttcctccaatttaactgataacactattagtttaacagtaacctagggtagggtggggtatgactattatctcagcactcaggaggtggaagcagaagttcaaagccagtttctattacataaagatttcagtataagtttgggctaaatcatgaaagtccttttcacaaaataaaatgaataaaagaaagatagtgagagagaaagacagagacaggattggaggagggatagggggacagggagacaaggaagaggagggagaaggagatagatatgactagatgtcaataaaaatggattgatgctgcatgcatgctcagaaaaaatacctatgttttaacttgaaatgcaaatacctgaagcaatgagattcttgcttgaagacctttgtgataatattgccttcctttattagtgcaaaaggtgtcacaagtgtcacacataaattttccctaggaaagataagaatccattcataaacaacccttttctaggtaaaagatgttgctcccaattatatatgataaaccaatgaacactgatatttgatatcatcatagcaaagagaacaagaccctgagttttatttagagtgtgtcacacagatacaaggaagatttgtagctttctttgatgtgctcacatgaaatgcctgtagtcaaacggctatttttaagcttgagaagaaactcaggacaaaaggaacattttaaatataaaagggaattcaggaagatcacaaagaagtaaaatcactattacaaagttcaaagccacattgttcttcaaatatcaagacgctgacttaaatatcattggtgacccttattcaagggagaatttctagagtttaaggaagtgatggacacatggccactctttggccccttttagaaactgcttggttttggaacactattatgtttcttgcaaccaagtctcctgttgtgtcagacttttgaactcagaaaggagatctgaactgcaagataatgggtaggctgtgacaggcatcaagtcagctgactaccaaagacagggagaggactctgaagggtcagtcctctgtctgagcagcagacaatcccttgttagagctttagagaccaagggttggcccctgtatggatgggagccagaactttgctttaattcggaaaggaagtccgggtacttcttgtgtcagggattgtcctacaagctctccataagattgtatgggcagatcttaattaaacttgcccagagaagggatctctgttctatggttagaaaaccctctaaatgtacatggatgagaacttgtgctacagtcctattctggtaagccattcagtttgttggtttatttcctcctagcagaaacgtcagaaaataatatgtatatgcaatatgcaagtgtggaaattgactctcagagagaaacaatatggcctatgttgggatgttgggctacacttccttccaatctcttctttctgaattctgtttttctagtgctctggtgtagtgtgtgcttgtgcttgtgtgtgtgcttgtgcttgtgtgtgtgcttgcttgtgtgtgtgcttgcttgtgtgtgtgcttccgcatgggtgactttctttcccccccacaactgatgtgctcagcaaagtcatttatcaggaatataaaaaaaatcactggactgcttttatggcatttcaagaaagtctattacaagcctttcatttaataaataagaaatcaaaagaagtactagctcaactgggattctgagtcatcttcagacactttcttgttacacatgtcaatatcacatgcctggaagtcacagagaatgtgccagaaaaagaagatcaactggtatatttgaaaaatagtttgacttctgtgtcactttaaaatctttatttaaaattattagagcaaagttgtatttcccagctttattgaagtaagatttaaaaatacaaaaagatgcatttaatgtccataatgaatcttacttccaatgttacagttgaaacctggaatttcatatatattacacaaatacctcccccaaggcatattcccaacctgagtaccttcgtcctctcttcctcctcctttttcctcttctccactttttattttattatattttttccttctgtgtagccctgattatcccatgaaacttcttcacatttcccttttgagttcctgccctgacttcctttatggtggactgtgattgtggtaggaagacataagacaaataaatgttttcgtcctcacgttgcttttacaaagtttgcttgcttgaacttatttacctttatcagtgttttgtctgcatttgagtgcatctaccacctgcatgctcggtagccgctggccctctgcccccaggcattggattccgtggaaatggagttacagacagttgtgaccagccacgtgggtgagaagaggaaacagactacctaggtctcagcaacaatgagccatccctccagtccctacccctacctcctaaaccacaccaagttgctttaggtcatggcctttttcccaacaatagaaagtaaactagtagaggctggtctactttggaggaagccattcagaaacatgccatttttatcaactcattcacctgacaatcttcacaaaaccacctattaggtctgtcactaagaacactagagctctgaagagtttatcagcgggtagccggtgaccaactttaacacagagcacagagctcagagaaatacctcttagaaagcaaagagtgtggatctccctagtgttcccatggaactcagaactagacctagaaaaaaaaatatctgagaatatgtgtactgtacatagatacatctgtctttactcacaccctctttgctgtcaaaaacaaaatagaaagtaccatagactgtgtttcctggtttgttttctttgctagttcttttagaaaaaagtcacaaagacaagagcaaatagagacatgcacagacagagagaaattcatgggtggcacatcaaagtcagtaaagaaatatgggagattatggaaacaagagaaatagaaattgaaaaaaaaatgcacaaagacaaagctgagagcccatgtccctacacaaggaatgagaaccccttctaacaacacttcctgctggcaagtttcttcccaaactagattttctctgttggaagacaaaagaatttgccatatgggagttcggcccagtggtaccagattcttccatttttgtaggcatacaggtatgggttattgggtataatttgaattttaaatgttttctgtgaatttcccatgaaagtcaatgtgtaggccaaacaaaacatatctgactaacacactgagaacttccccttacactcttcgaagaaattagcccaaggttcagatccctgcaccctagctcaagcccacagaacccaagactgtggacacatctaggagcctgaattttaatgactttattatgtaattttatttgagagccaggaaaatcacatactgggggagggagagatgcataatcacatttgaatttcaaagcattatacttcattaaatccaccgctttgtggatgggattatattacatccagagttttttgacttacatgtactactgtggcttttgtggaatttttcaggtcaggattattggctccaactttatggtttaatagatagttcatagttttaggaccagggggtaatgagcacttacctttaaaatgttccactaagtaccagtttaagatgcagtatatgtgacttccttcacactatccaatttctgggcattagaaactattttctgacttcatggttgacagactttcagtaggtgacagcagtggctgcagaaggttgtcttctcctgcatctttctctaacagtcttaatcctcacccttcatccccaagtcccttgtcaaggacatcctcctaaggttatcagctatctttcagcatgcagaggagatgctgtgttttttccttctgtgatttttcacattgttcactatcctatataatggtatatgttatcctgacctatttgatgtggtcccatgtaaaaactaggccatcaataattcacttatatattctttttataaaatgaatttaaagaactgctggtttgcttaataataataatacaattttgagaaaatttcattttactttaatcatatttataattttatttcacttattattttttctacctcagaggtgtgtgtgtgtgtgtgtgtgtgtttctgtatacttggcaggaacttgctgcatagactaggctagcctcaaatctgaggcctttctcctgcctctgcctcctaagttctgaaattaaggcataggcactttgcctgcgattattttttctagtttaatttacctgaaaatttattagaatacacgtcttatttaggcataaatataatttttaattaattattttatttataccccaaatgtttcccccctttcctggtccccccttccagagttcttcatctcattcgccctccccttagcctctgagaaggtgctcctccctccctctcccacactaccctccccagtatttccctcccctgtgtgcttcaagctttgcctgctatattaagcactttttaaaaagtagatccgcgagagtttgtatttttttctcaaaccacttttagaaatccaattacttagcatgcattttcaacgccatacatcaactgcagacaaaccactaatgtatattattttatttcataaaatagttgcaaaggaactataaagctttaaatagttttatatgcaagatagaaaactttccaaactttaaaaacaacaacaacaaaaaagggactggtttgtgtgtgtgtgtgtgtgtgtgtgtgtgtgtgtgtgtgtgtgttgttctctcaagactcaaggctcttatttcaaaacccagatgggatttcaaaatacgagtaaataaatgtcaaagcctcttggcctctgcactgctatcctatgtctgaaatcttgccaaaatgaaattttccattcaagaaggactggaatgtactaaactgatttaaaagacattcttaaaaagtggtggaaactttgtgcaacttctgcgcacctcttcttgcgcatgcagctgcttcagtggtcggacatttctaagaagcgtaacacaactgaaaattaaattctcaacgctttccttaccttctgctactgtattattcttctcctcggtgccaagggtagaccataactaggcattaggctagaagctagtatttcactaagaagccaggagcaaggatgagtggaaatatctcactgtgaggacagagaaagagaacgggagccaagagaaggggcatgcttcaaatgtccggttgctaaaggctcatacttcgctcaacattttagacttctcagaggagttgtagacaaagggtccttagtcacataagaacttaactttcaattactgtgggagtcaaatagttaacaggtagggggtccatctgaagaactgcaaaggagaaatgtggagagtctgcagcatgatagaccatcctaaaagaagaggcttgtctagagatgatggacttcgggacctagaaatcggcaatgtgtgaaaacgtgcactaaaagaagctggggagaaaatgacacggggataaatccaaagtagaaatgacagctgctgagaggagaccgctgaatagtttctacacagtgagacagcttacacatttacacaaccacgtgctgaagagcaaggaaaagttactagtcctttctcagctttctttccactctcaattccctccttttcaggattttttcttagtcagggcaccccgggattatacaatgtgagagttccattagcctagacttacttcctctctctctattgctcttcgatagaaaggtacttcccctcctctacggtcattggtaccaagtgtgcagaggcggaaagccaaaacagaaacacacagacacctgcgcgcacctgcaaaacaacaacaacaacaacaacaacaaaaacttttgtggtttgaggaacttgggcctttgttatgtattttttttctccttgatccgccacgcccccaaccacgtgacccagagagattgggattttgtgaatggagccgaaaggtggagtgggggggggggggaatgggcaacgccccctgctcgaaagcatccaatccgctggcggagcgctgcggggtcagcaataaacaacaatggactggaaatccacggttcctcattggcttcagggacaagctcccggggcctttcgagaagctccgccctctcccggttgctctggatacctgtcccgctctggcctcacagaaaggctttggaaactgttaccgccttgtctggggtttgcagactggcgggttacccacgctgtgctcccctcttcgggttgcaccctcacaaagtctagtagcgttcgaacgcacccctcgcccgggctctgatactgtcctctctcaaagaggacgcgcgcggcgccctgactaggcttggggcaagcattgtgtgtgccctggaagactacacttttcccttggtgaagcgcagagtggttttgtcataaactacgctctttctcggcgggtccggagtaccaggcgcgcacgctcccattttgatgtttccaccatgttccatttaagggaagaaactttcaaatagaaattgagaactgcagcacattgctcaacggggctaaacagctgctggaaaagtcctttagtccccagctctggtccccgccagggtctcaagtgacttttagcaccgtaaagccccggccccactcctccctggcttccaattcttggtagggcagcggctgcaaaggggacacatcagaactaagctctgtgggcaggcagcttcagagagattctcgcttccaaaggtcccatcattgtccttgtaacccgagccctccctgctcttcccccacttcttggtggaggaagtgaaatcttcaagtacagtaagtgacaccctccgcctctctgtatacataacaaaagctccggaaacggcggggacgggggaggggtgcgggaggggggcatctgaactaccaagtcctcccccacccctctgtggccactggaggtttttttccctctcagcactctccaggatgaatctgatttttatactttcctcgcccactctgctacgtactcctccggatcctctcttccagcgccacctctccttagaagcagcttctcccgcttgctttccttacaatattttcatgtccaacggacgaaaggagatcatttttgttgaagatgtattaaaaaaaatcttataagccctattacagtgttgaaaatggagaaaaaaaatagcttggaccgaaagcttctgaggagcaaggctggagcgtgtggtgggtggactccgggtcaaaggtagagaaaagggattgtggacactcgatctgtaccccaacctctacgacagtgctttaaggacataataatggaccaaacaacgctaggaatgagaactggttgactcgatacactaggtttcagtatccctccggttttaacaaaaacagcgagttaggaaggaagtagtttccctcggtggcttttcctgggtgcggaccctgcgacttctcccagagtggtcgcaaaggcataggggcgcaggagacccaagggaaggggccgaaagctgcctgattgacagcccgaaatctgatcttgtgaaagagacgtggagccaatgggaggcagcgatccatcagtttggattggaggcccctggaggagaagtagaggaaaaaccaccgaattcagctctgtcagaggcgctttcggcttccaaggggaagtgctgggcaataattaatgtttttattaaatttggagggaattttttgcagccgttcgcctagcgtggccttcaggtgggtatttccaacaactttttatgtctctccagataattgcatggttgtgggttgcaaaaactattcttatgaaagaggtagctccgtctctttagtcccgttaggtgaaaagcaagtctcgttgatcgccattgctagttttgcccacgtttgcgaatcagagccgcctggggtacactgaccgagcagggagcatccagagtgtaaataaatacattgcctcttgttaggatttttgatacgaccgaaagtatgtaaattgtgaactctcttggctctctttggatccaggtgaagaaggcggcgtaggggagggttatttttgtgaatggggctgtcgagggtaattagctatgcaaatgcaagagcttcattcatgattttttttttttttaagcctaaaagccatcttgttcccctctaggttgatagaagtccagatcccgaggaaatctccagctaaatgctcaaaatataaaacactgagctaatatttgcgaagaggagcagaatggatggattttatgaccagcaagtgccttacgtggtcaccaacgtgagtgatcagttcgaaagttgctgtttataaacttgacttggacgggggtggggagagcgagagatgcgaagggagggggcagggggttgggactgcagacactttatctgctttgttgccactgtagggcgactctgcttctagaagccctatctacaaaatgagcttacctttgagtgattcggataaggcatagttttgttttaagacctcttcttctggttaatatgtccacgatgagtgcaagaggagacggagggcagcaacagctgcactcaaagtttgtggctgggtttatctgccacattgaaaagaacgaagttgagacaaatgctgacaattttgtgtttacatggggtgtcttggggggggtcttccccctcccctctcattttctcacttttcccagttttcctttggcttctcttattacgggtgggggtgctgtctgagagaatggaattcgctgttttaatctggagttgattcagaaaaaaaaaaaaagaaagaaaagaaaaacattaagcgttttagcttaatgttttgatgctgagattacatgtaactagaatgaggataagcaggagtgttaggacatgctctgggaagcaactctccctcctcactgcctgccgaactctcagcctgagcctccactgtcaaagtcagacaatatgtgttggagttctcctgtgaactttttcttttctactcagagagaggatccagtaggcttaagttatgtatgcattttttttaaacgtgtgacatctgaggtttatattcttttaaaggattttatctttccctttgtagagtcagcgtgggagaaactgtaccgagaaaccaacaaatgtcaggaaaagaaaattcattaacagagatctggctcatgattcagaaggtgaggtttgattctgagctgaacgcctcttttttcactgatactttttcccctccaaagggggacatcttaatctcatcgaaaaaatagtagacattgaaatatggactgaaacatgcaaccactcacacagtgagtttgccttggagactattttatggtcttgtcacaaaagtaatgagaggaaaataaacacgtagcagtgaccttcttattttaaacagtattttgtgttccttcttgtccatttgtcagataattccctgtactgagataacaatttcaaactgtaacaccctgggataaagtaagcagccatgcctgctgcttacatttttctttcaactttattacaagttaaacaatataaatgaagccatatattattgttgaaattttatgagtttgatgactgcattttgaagtcataacatttgttgataggccgtaacatgttcactagatcaaacttaaggcttattgaatacttataatattatttagtaaattaggctgtagattcttcttataaactgttggtaggaggtcaatatactatgaattatttcagccctgtggggccactcattatgatttgaagaaacttagacttaattactaaagttcacattgaatttaaaattaaatggactgaattataaaacttcatgaaattttcattctcattagacacttttcttcctaccccccaccctcaccccaagtgaggtggcagaatataatttggaattaataataaaccaaagcaggacactaatgtctttgacgtttacagatcggctaaaaaaatttttttttcttgaaagcttgtatttgaagttgcaccctgtgttagtgttgagctatttggctggaaaaggtaacttgggaattaactcaagttctgttggtattttgtacataaaattcaagtgtaaatgtcctgtctttctaatatctaccccacttctattttagtaagagttaaacactcttaggaagggtttctgtacttagaccatcttagtgaatttcagttttttttttttctttttctgagcttacttcttagttattttgaaaaagaaaaaaaaagataaaagaaggtaatttgatttagttgcctaaatataatattatttagttgcctaaagaaatctcttaaagtgtctcttaattgatgtcataagcaagcaggatttattgagatacttgggatatgaatcctatgttcagttgacactccctaaattaaaatcatattgaatggcagtgtcatgacaaacattttcatgtgatgaagcctacagactgttgagtctcatgttggtgtgtctgacttgctttttagaactctttcaagatctgagtcagttacaagaaacatggcttgctgaaggtaagaggcaaaactgtctttaagggggaaaagcaagtctagaagggggtggagagagtcctgaacttgctgtcttaaatgttcaacccaattaattgagctctaaaagagccacctcatgtgtcatgcatacattagagcctctgatgagtttgtctttggggactctggggctgcactacccagtgtcatcacaaattaccaggagaaattgcttgcagctcacaatcacatctgcttttggcaagaactaatgcaccaagacttcaggttctaagcctctgctcagattttaattgcaattgatcaggtttatattattgtacctcaagagacctcaagccagaactggctggcttgctgtttccctcagagcagcgcatgtgattgtttggttctctgctgactgacttttctgatggcagaaattagtttctctcggctcatcaggacgggatgcttcaagatttaagtgcaggcgtcttcttccctccttgttcacaacacagaacattaggtgtgtatgtctcagttaagaaatctgcaggtttaaaataaacctcttacggggattcagagggttttaaaaatgtttcatgtgtcatgatgcatgtaatgtttgttgaagtttgacttttgatgtcttgtgacttttattaggatttgatatggagacatttaataatattttgggtttttaaaaaattttatgctgcagcctataatatctcttattgtgtgcaactttgtttataggaacaatgagatgaggcttcagtaaagcgtgacccattctgatatgcttaaggtgtttattggctatttactatttaaattttccttctggatatttgtgaaatattttataacctctgtgtgtgtgtgtgtgtgtgtgtgtgtgtgtgtgtgtgctcgagtgtgtaggggaatgagaaagttgctgatatttaaacattcagtatgttttgttatttgcatacttactgtggggactctaattctggtaatagattttcaagatggttcaaaggaaagggagggtctccagatggatttctgagcgtctctaggtgctttgaggtagactgaggagtttttagtctggatcttgtactcagttgcttaagttgctgttagcatgtaaacaagtttctttgtcttgcttataattctagttcttcagaaggcttttacaaccttaaaggattcaaaatcatttaagttaaatagcttttaattatcctttgaaagggggttgcatttatatgttaatgaatggtaagtattagtgaaagttttatttaaatttaaggtaatgtttgcttgtctctaaatgaaacttactgcaataggattacttagcattaagatataaactatatattcagataactttctgtaaaaattggcagaggttctgatgttaacttttatcttttttgttgtgttttattttgatttggttcggttttttgtcattgttattgttggttttgttgtttgtttgtttttggtttttttttgccaagttgcaggctatgtggcattttgtttatttaagaatttactcgcttaaccaaaataagttactatactcacctaattgctgtggaaggcttactggtcctaaagatgtttaaatttgaaaactgaatccaaatgagtgcactggttggcagattttggatgtgcataacagctgtttctggaattttaaaatgtggatctctggcagacttttatcatttttagtacattttctttcttttatttttttactttgcacttgccttacttgtgtcttatggctcagataggagaattggataatgtatctgaattgagtttatcatttaaaacagcatggaatattcttatctcttcattacctgcaaaccaacgctgaaggcttatctttatataaaataaacctagataaggactaatgtatttgaagtaacatgcttttacttagacaagaattcataagattaattaaatacagggattagtcttgagggtttttctttactggataccaggtgtactatttacaagctgcattttaggataatgtaaacattttcaaaatcgctacatgaatttatatagttatgatgcaagtaaaatttattaatgcagtttttaaaatctagtagtaagaagggttttttaatgttagtggactagacatttagttttggtccttagcaattaaatataattattgtgtacatatattctaatttggcttatcctctgacttgactaatattagctaagcaattggaaaaattggttaatttgtcactagttttgttcatttgtgttcttctggacaggcagaaattaatagattactaagccagcagacgataaactgttacatatttctcttcttaatgctcgatagccaagaaagcatgggattttaagacattttgatctctttaaaaaaagatcactgacaattaaccaagtttctcccttgagttcgaatccctctaggaagccaacaggtccaaaaatgtttttagacagaagaatcaagtttgctacagtgtgtcatatgataatcacattgaaaacatttcccaaagtccctaaatagaaatgatgcttcttagaatttttaatgttttttttttttttttgcttgcaagaattttctataaaccatacccagtacaacacattgattacatatgagtaaatggttgtgtatcctgaaatgtattttatttcggaatggcagttgaggtagtacaggcaggactgttggagggtaaggttagagttcatacagtcgcctctaaaaatataattgcattttccctgcaactttatctccatacagagatctaaaacatgtctgtacaatgtaacttcacattagaagtactttctaagcaataatactgcaattttcaggcttgtaacaaatataccacaacttaaaataatcacttcctgagggaaattataaagctcatgttctcaatgaccacaacaccagataaaaggaatagagactctgcttattttaaatgttgccatagttacttcatattgaacttcaccatggacaattctttatcgattctcagtcctttcacttagatcgctactgacaggccattggaattatttgatcccttgaaataacttgttcaaatgtcacttgtattagcattgtagcaattttgtgttcttaacttgttttgaaagctgtagtaagttaagtagtgtctaaaacttgtgtgtatgtgtgtgtgggggggcagaaatagaaaccatggcacttttctaaacatatccaattgttgcttacctaataacacaacatataggaaaataatatgttgcagtttatatcacatgtgaaacagaactacttttgttttattttgttgtggtctgggtgtcctgaggtcctctgttatgaatgagattgcggagaacgtccccagtggtgattcagtggcattcagtgacaccttgaagccaagttgcaggatgcagccacagctatgtatactgttggagttttaatatcaggaataaggttctacatcaaatgtcactattatctcatacaaagattgcctttcggttttatgaatttgtcaaataatactcatggtgatctagagatagaaacattagtaggttttcctcggtttgcttctgatacagcatttacacccaaactatatttttatgatagttactgggaaggtgagctgttttcgttctttacatgtggcctccactgcacacagtgctcaggagcctagtttttattgttcaaatatcctactttaaaaggaagatagacaacagcactggccttagatttgcttttctttctttttcttatttggctcactatttaaaactatagtactttgtgtggttcaatgaaacaggatctgataattgagcattaaggatgaacatgtaggtccttggaactgggtagtagatgattcttggtgtgtgtgtgtgtgtgtgtctgtgcatgtgtgtgggtatgtagtgtgtgcctgtgtgtgtgcctgtgtgtgtggtggtggtgtggtatgctgtaaagagttgtagctactaccatcctttttggttttttctttgttgcaccggaaacctctgtaagatgtgaaagaactctcatgttttagtagtggtaggtcaaacaaatggaacaagtgtgttttatggctaaatatcttatggaaaaatgtaagtgtggctcatctatgatctacttacaaagaaaaaattccttttaaatagaaaaattcgattgagtggggtatagtgccattttcttttttcagaaagtgctggactgtgttgctgaaatgttgctgaacttttccagttgagttacaaagactgtgtaatatcttgcacgttatactgtaactttctttgatttatgtacaacttggtaattaaaaaataataaaaataatgatagaggcagacctttgtagcactaaaggaaaaaagagtttggttggctagagagctagacggcttcctttttaagttttcaagtcactgcaggtcaggctagttcgaaattgaagctgttttgagaccttctcttcctgctttgagtgcacatgcagagtgtgtcaagcattaaaggactctctgtctagggaagtcccccttccctttctgcttaaatatgtttatatttctgcactaattaatgcttttactttgcaaccattttaatgtgaaaaccggatgtggtctataaaaccaggcttagtggactcatgattattttgttccatggactgaagcctcattttaggattagaaggggtaccaccgcgcaaatgtcgattttcttctttatttacttaaaataaatcgcaaattccttcaggtaaattcgttcctaaactttgatccgaacgctatgaacctccacagtgatctcttacattcttatggctcaaaatctgaatgataggcaaggaggaaaggccatttatttatttgattactcgtatttattttcctccagggaatcagggcttcccacatgctcatcaagggctctgtactttagtggccctttcttctcccccctttctttcccctcccccctgcttgctcttctttctcccttctttctgttcacctttccttatttttcttgcactttcctaagttttgtacatccatgtttttggaacagggtgcccataaactatgatggatttaatatgtgtgtatccatctctttccttctctccctcccatattcctctctttatgtatacgcgtgtgtcatttatatgaacgtgcttctcagtggatctgtttgagaaagagcagtaaacttggcgtgtttaccctgcaagttcggcctccttgcttcagttctctggaagggtgtgacatgaaaagattgcggttgggccacatggttcatgctggactgtgtttttgtgaatggaggcagaaatccagttctgcctgcttgtcttgaggaaatgctgaggagatcagctgtctcattcacgggcagaaagtatgagtcatacatcttccgccttgtttggctccaggtcattgttacagtggatagaactggttttaattaaatattaacccctttaatacttgacatttgtttcatttgtaattttcccactcctcccccgcttggctttaaaagaaaattcaacagacagctagctagcttgcaagaagaagagggtttttctttgcctgtagctaaattggaaaattttttttaaatgttccccatttcttaaatggcgaatactattttatttgaacgttgaaaatcagtgtagggcagaagcaagctgtatgtaaaactgctcttccccagggctccggtgcttaagaacacgtattaaagttgaaaaatggggcatcgattctgtgacattttggttgcgattgatacttttatgaatttctttcccagagtgcagctatgtcgcatcaggcaaagcattagagagcagctttggagaggaagctagataaagccaatagcctagagtttatacagtgtccttttaaagcaaggctttggagacgcaatgacaactggcctattaatgtgcaacgagctgatagagctgcttcagcctttaccaataaaatcgacatgctcactcttcatggaagtcttttatcggtccttggtacatattttctccccttcgccattcttcctctttttcctctttcattacattgtgtatagaaacattttcactccccaaagacgatcacctcaagcagagcttagagtagtagaccgtaatgcaatacaaacatttagaaagttttaggttggcttctattactaatttttaactttgggcttggtatggcttgcaacagtatttcaggcagctgtagtttacttcttcatagaattcttgtgaattaaagaaaaaaatgtaggatacaagtgtggggatctgtgtcatattttccttgcccaaatccaacttgtgttttgagttaaatggtttccttctcctccagcttcaagttcgaggtagacttgagcctttgtcaatttaaatagagcactgcttcgctcagtctattcagtttcttaagattagcttctgtgaaaatgtgagtcatatgttttttgttaagattctgtaatatgttcaagcataagtgtgaagtacttattcagtatgttaaggagttagaacagaaatagcactcttcgtccttactccttttacaaattgttagtagggagctattttctccgtactgatgaggtacaccttctagatttctctgcccattagatgttttccctcaccccacacatatgccaacgcccaacacatgtcgcacacccactggagcctttcttgccgctactcatgtggcgatgtgttctatggagctgcaactctggcttacgagactgaggaaaagtctttccaaaagcgtatctataccagcatattaagttgcagataactcactacctatttttaaccatttgtataaacaagcattatattatcattagattatttaaattatgttttattattttattgcatttgtctgctttgtgctaccacactggaaggcaagttcattttaaatataaaattatcttattattttgtatgtataggtacttaggctgaatatttatctgtgaaccatgggtctgcctaattccctcaaatatcagatcccttggaactaggtttagagatgatgtaagccagcaggtggggtgctaggaattgaacctgggtcctctggaagcatagccagtgctcttcatccctgagccatctctccagccccaaatgttggcttgtcaaaagcatattttgcacctcaatatttatatctgtttagcttttttgtttttgttttgttttgttgttgttactttgtgtagatcctagttatcttggaattcactctgtagacaaagatggccccaaactcagaaacccacctgcctctgcctctcaagtgctggaacaaaagtgggtgccatcaaacctgccctgtatctcttcagattttaatttagaaggaaaactacaagaaggacatatgtttttaaagttcaagatttaattatttacttgttattattaaatatgtatcaaacacctaattattttaggtgtatacacgtattataaagtacatttcttctgtgtgtaacatcattcggagcagaaagtcaagcctaccccaacgtccaaactatgttgtcagtagcaaaaatacaatgtaaacaactaagaggatgctagtacacccaccttttttgactccaggcatgtgtgtgtttgttgcttgcttgtttttgagacagggtttctctgtgtagccctggctgttatggaactggctttgtgggccaggctggcctcgaactcagagatccatctgtttctgtcccctgattgctagggttaaaggtgtgtgccattaccacctgcttcatcaagccatgtttgttagaagtgaaaacagacaaacaaacaaacaaacagtcaaacgaaaccacaaaagaaaaacaaaaacctggcctcaaaaacgtttgtaggacatttatgaatgtgacttttcaggaaacagtgtggtagaagattggaaagaagaaagggtctaagaccgaagtgtctgtatcatgtttaaagaactcgatttattggtttcaaaaatcccctcattgcattaaggtgggtgggtcgtggaagtagcattgaaagaaattatagaacttacctataggtggcaagtcatgagtctttgaggtgaaatttatccaatttgaaagttaataaacatagcatcagctactggttgaataagaagaaaaacttgcttcttacacaggctgatcaagcaggtaccagttatgatgggaagttattgctggttaattttcatttggtggtaaggaatggtgtgtcttcaataaagttaagtactgtcataaagtaaattatgtcatatggaattctgttattgtgtggattttttcttaactcacttatcattaacatttcgtcagagagtgatcattgtttttgttggtggtggtatgatttagacagagtctcacattgtagcttaggctggcttggacctcactctgtaccttatgctagatatgtatctcagaatattggtgagcctcagctttccaaatggtagaattatatgcctggctaagactgattattttaattgacatttcccacagagaataagttcattcattcattcattcattcattcaaaaaaagactgtcatctgcttttatatgactttatgggatcaaaatttacagtattatacattaatagtaaagtaatgctatctaatgaggtcacgttgaaagtaaatatgatgatcgttcatttcatgctcagcaagttacaagtaacctgatttctgttatgtgtagtttgtttatacaaaagatacccatatctttgtgcttggaaactcaataataccctccacgataggctatttcaatgtccacagcgaaggtaataaacatttcacggtgcaggaatggacttttgctttaattgccccagatgtatgaagtcctcccgaccagtaccttttctttaataatgaaggacatcatttgaccttagggccagtgaaacggtgagattcttttccttagcacagactgggagccaggaaaacatttttcctgaaaattattatgaagacaattgttaaaatgcattgctttgttgcatgtggctccagtcagtggcaatccttgcattcttgcatttaaaaactttccatcttgctttggacaagtttagggcaaatgtttttaatgttggttgtctgatttgcaggagatggaacctagcaagagaaatcaattctataaatgagaaggtattcatgtgaattcaaatgaagcgggatatcacttgtaaaaaccttgtagatcactgagatggtccgcttaagaacagccctgggtagattgaaatgcctttagtacaactcctgcaaaatgcatctgtgtacgatgtagaaattctgcaccttgtattttccatcccctcggtttccttttggcaggtgaaattcagagggaccacacttactgcgtgatatttcggacacactcaagttttctagttctatcaatgggcctttctgttttctctcctctgccttgatcttttatagagcaggctatattggcaaataagcgtaggtccgagctccatctaaacagaccttgcttgatacatctgattcgattccttatgtcttggcagttccactcttaattttattttttaaatgttctttttcttcttcagctcaggtacctgacaatgatgagcagtttgttccagactatcaggctgaaagttgtaagtacggcatgactcatgtcttgtgttttctttgcctgtcttttttttttttttttttgaatcgttctttctctttggttggtctcctcttctagtgtctgtctttgcattgtcccaggattgtattgggattgccatcatgaagtgttttggtttgtcaggctgtgacatcagcaggatccctgaatgatctgggcaaagtttccagtggcggggcaaggaaagcagacctcttaaaacactggctctgttctccatatctagtgcatttccttggagaggaaacagggtgtgctgcaattgtttattccaactttgccagtgcgttcacaaggaaaagtctggatactgatgggaggcagagtcatgtaagattagttattctataagttgtaaaaagatcttggttcagacattcactggctaattgcatttctctatattcacaaactgtcacctgctttgatttaatatttagcctgacattttcagcttccaggttgcaggagcacatctggaagcagcctttggcttcttacagcatcccttttgtgttcctatccctgagccttgctccagggcctgtcagaatgcaggaagagtgattcatagatacttgccctcccttaattgcagagtgagcattttgcctgcacaaacatagttgccccagggtttactgctgatatttatactttgcaattctagcattaaccgaggctactgacccatgaagtaaatccaaaggagaggcatggttactccctgtcccctggggacctgttccgatagagctggtggattcacatctccatggaccatcttggacctagtattctagaggctcctttttttcattgtacatgcacttctatgaaaaagcttaatttgtaaattagtaagaaactaagagtggtaacaatgaactacaacaatcataacaaaaatgtatcattaaagctatttaaaattagaaattctttctaaaacgttccttttcctatttggcctttgactgcagaaagtgaaactgtctatgggtagaggccatgaggccatgttatgagagctgtctgatgtattatttactttcagtgcaatttcaatcactaacaggttttgtgcgttcagactgttggcagtatcagatgagtccatgtcagcagctacaggaaagtcttactagcctacacctcatgaaagtcatattgtagaccctgggccctcaagctcctatattaatacagtcaggtaacagatgcttgcttccaatgtctgttatctttagcttccaggcatagaaggtccttagaggtttcttaaggataaaagccagttaagagatcaaagaagaaaaggtataaaaacgtgacttccaggtaggctgttttgtcctgacagctggtttgatgctggagttctccccagtttctccagatgtgaagtgactcagtgaagcttcattcatccagcagatgacaggtttataatcaagttcctcatattatagcttgatttttttaaaactcattgtagtaaaatgtagacaaaacaaaccccatcattttaaccagattaagtgtggagttcaatgacactgagtacattctgatttctggactatcaccatgacagttcaatattttcaattatccccaaatcctatacccataatgcaatagcttctgaccccctcagcacctgcaaacattgctttgtcttctttttatctgtactgaaaagagaatctgatatactgtttgatatctgggtacaagtatttcatagatctctcatgaaacatattccggagatttcaaccttaagaactagagaccttctgtgttgtccctgtactcttctggtccctcaatctttctcccaactctttctgtaagactccctgagctccatctaatgtttgggtattggctgctgagtggagcctctcagagaacagttatgctaggttcctgtcttgcaagcataatggggtatcatcaatggtgtcagggattggttcttgcccatctaacctagaccctggggagttcccagaaactgagtaagcaaataaagaccatacacaagctggatccaggcatgcacatatgtagcaggtgagcagcttggtcttcatgtgggtctcccaaacaactggaacaggggctgtccctgagcttgttgcttgcctttctgccagtggattccaggcccctaaagggacaaccttgtctggcctcaatggaagaggatgtgcctactcccacagtgacttgatattatatggggtgagggatggggaatttcacacccagagggaagcttcccattcgcagaagaggtgaatgtgggattgggggaggactgggaagaaaggaaaggctgatattgggttgcaaaaagaatacttaaataaagttaattgaaaaaaaaagaggaaaataaaagagaaagaaccagagacctccaaaactctcataagaacaatcgctaaaggtatctatgcaaggcccactcttactgattgaatcgttggaagagaaaggtcatctttctactatttcctttcctgatttttttttctgcaagttcaacttgtcctccaagtgaatgaatgacatctcattgagtcatttcatgtctatataattgataaggattccagaagtgcagctgtcaggatagaaaacaatacctgaaagtgacttttactgcttttcttgtttgacatctctatcagcatttattcttgagtacttcatccctcacaccctcgtccacagcaatgttgtcttctcccttccttcttttttctcctttgattcttcttcatactccattcactatctgtctattaagcagaagacatgtggtcagggggaccacagaaatgaatttttactttgagttaaattggattactttcacttgagactcatgttggttactattctgagatcatgcagttctcacaagccacacctacaagaccatcattatcaacccagatctctctgctcctggctcctcaacttcacctgatgcccagaagagtccctatgtaagcagcaataggtgacacctctggactcacccaacactttgctgtgtgtaggtgtaaaacactgtttagaccaattgaagctctaagttcacactagaaagaccaattttttttccatattagcagttgttttatttttatttatatttttgagatgggacttagaagtttccaagttgccctaaaattcatgacggtcatggattatcatggatgatcatggataattatgaatgatcatggataatcttgaagttttgattccacactccccccaccccccaccacttcctaaatgctgagattataggcatgtgctgtaaacatatgtgtcttttttggttctgctgttcttttaaatgaagtcattgctgtccaagctttaaaaaaaaatgctgtaccttcagttagctgcaaaaacctgcagttactgtattgttcaactgcctctcagaagcatctcaggttccgaggtctgtttcatccctgttccccgtgttcctgttcctcagtccgctgccaccgagcttcagaataggttttacggttggttttcttgtctgtgatcctttctcctgccagcctgccctttgcatccacacataggtttctggccttgttagtttccgctttgtacatcttgctggacaaagtccttatgctggagcagaacattgttctctaaccaggccttggccttcttttcaacgcagatttgcctctggtgcctccagtacttcttccccgacagatgtctttatatcttagtcttttttacttactttacaattctccaagtgtaacacactttttttttaatgtgttgctttaattgtgttgctttaaatgaatgtacttttgtgagcttttggtggtcttcatattcagttcagatgacatctcagttgcccttcttggcgttctcttgctgcctttgtcttacagatttagtgtacatcatcatatctcttatctattgtattagagaattatagttttgtttattttgtttttttgctttgtttttaaagagacccagtgtcactatacagctttgggctagccaggaactcacaatgtagacctggctatccttaaactcagagagatctgtctgcctctgcattgatcatgcgggcattaaaagtgtgaacacttttaatgagattgtgaacatcttaagagtcaggggcatgtcatatttaatatgcttgccatgttacagctcaccataaataagattataccaatcatctcaattttcctttaaccagcaaatattgacagcttaatggtacctagaaatttattaataaaatatatttataaaagaagcccataaacaaagggtgaatataaatctaaagtggcctaatacaaatcaaggtaaggcatagtttattttaggttttaactgacaaaacaaactttcattcagctgatgctgtccagctaatttcagttggtactaaggggagaataagggaatgatttgaaaagaggaataaagtgtttgggcttagagcgaagagaggacttctagacttcttcataattaagttgtcagatagcaagcagaattgagaggttggacagtctcagaagtgcttttatagatatttgattcttttctgtctggggttgcttagtggggcagaagaaatagagagaaactggtccctcccccatgtggcctatcatatctacatttacctggaacgaacatagataattggattttcttacatacctccatgaaacaagatttttttctgaatttctcttcattgctttagccctttgatagaggaaggttagccaaattaaaagcaaaagtttattcaagactttagtcacactgcagaacactcatgggacaatgccatatttaaatacaaataggtgacagagaaatttcaaaaatttcgaccagagaaaaaaatgataatatttgggactttctaaaatattttctggcttgtcatatttttattgacaacatatttgaatttcaaatctggagcccaatgttacactgttgctggctaatttctgagaaattctaaattttgaaacatagacaccaaaacaagtaaaaaacaaataaatcaattcattacaagaaacaaatggtccaaacacataattttttttgttttgtaccaatacacctttcataacttacaattgtttggaaactacgttaccattttagtatatactttacctttagtgagaaactaagttttcaaaagagggacttaaaatagaatcttaaaacacagatgtatggctagcaagatgtcttggtggatcatggatttttgccaggtctcatgacctagaattccccagatgcacacggtgagaggagagagctctttctcaaaagacctctacatgtactatacatgcaggcacacacacacacacacacacacacacacacacacacacacacacacgtcacaaacatgggcatgcacacatgcacgtgcaatcacatgtatgcacacacatacagagggacagaacagagagagagagaatcagttgaaaaattgcttatctttccaaagtatacataagtttgcatatcagctaactttttataaatacacatgcaaaattatatcaattatctattaactcgtattttcagctcagtcacatcacaatagtcttttaaaatccaccttttctttggttcatcatgtggctgcacattagctccctagcctgtttcttctctagcttacacccatcactgcagtcttttccctgtagggaacgcaggatggtcagcgttcatggttacatctcacattctcccaggatgttcccaggactcccgtgcactctcaaaaggacagaccttgaagctcttctctaccttcttactcctaaagggacagaggaatgtaaggcagttagaagggtgggactggaggaatcatcttggctctgacatgtttatgagaataattactttcaaccacttccctttatctgatatatgtaatagaatacttagggaccatgtacaccaagtcaagaccaaccagtgtgtgaggactcaatgattcaaaagccatcactacatagtgacaccttccagtaaatagaaaccataagagtgggattttctcaggctttttcaaaattcagaacaatactcaccttgaagttttttggaagcagagggggacactctaaaaattactgttagaaatctgcttctttttccgttttgttgtttgtttgtttgtttgtttgttttttgtttttgtttttgtttagagggcagatgctatggcctagactaggggcttgcacactgtttcccatagaactctatcttaggccccttaaatctactttctaataggtcattgcagactctcacggactaatttattctgtgttgatacgattggaatatttcacttacgatttgtatttcttagctttttgcctttttgctaatctacaccttcctacacacacctttgtaaaaagcttaactcttagaattaatcttgacatcttcctttgactaaatttgtgggttggccaagaggatttgggggtctcctttcactgcttttggctgtagagagtcaaaaattacagtttagaccaggtgttttttagtatactattagctctttctatcttttatttcttcctcttctttattctctcttctctctctttctctaaatgattttggtggggagaagcaggattccactgtgtagttggatgagctagaactccctgtgtagggaagcctggtcttgaactcaaagatctccttgcctcagcctctctctctaccttttgagacacccataagcattttgccctagtcagtctcatttccagaatatataagacttcacttgaggtcccatatctgaggtctgagtcctagctatctagaggatctgagatcccatgtctaaggtttgagggtttgagacatagctctctggaggagtcaacctctttggtctttggtttgttgctgttacttggtttgttattgtccttgctctttttgtttttgttttctctttctttctttctttctttctttctttctttctttctttctttctttctttctttctttctttctttttttataattctattgttttactaaagcaacatagataatatataaaaggtgttggatacataaaatcattctctatgcctccaattccttatctcacatccctttgtagaaataaacatgcttttctcccttcctctttgaaattgtatgtatctaggtcttttacctccatggctgtgcactatgtgctcccaaaggctagaaaagagcattggatttcctgggatttgagttacagatatttgttagcagtcattgtgggtgcacaggattgaacctgggtcctttggaataccagtcagtgctcctcactgtctagccatcctttcagttcccttttcgtattttctcttttgctgggaagggtgttctatgctttgcgatagaataatctgctatggttaaggtgtgatggaaggaggagcacggagctgcttgagcaggtgtgagcatgtcgagaaccagcaggatgacaccagctcttgtctaccaagtttttctttccccttttccttctgcatttctttttccatttctccttttttcaagggtttaggacaggatcttccatagcttgtgctggatttgaacttgctatgtagtcaaagatgaccttaaaatcataaaacttctgcctctacttgccaactgctaggatcagagacattaactactatgtccaattcaagattgtatttattgcctgttaagatagacaaaaagaagtgtttcaaagtttgtttttttcttgtaagagataggaaattctagaatggggcctcagaatctccaaggaattgttttgttacttccatggaggcctagcatggagtgtaaggttagatgttttgcctaccctgtcatttgcttactcggagtaaagacagcagcctcagtcttttgcagtgagctaatgatccctgctacaagattatatgtgcatctcgaagttatacgaccaacacagtcagttcctaacattattatctaaatattgtatcatctttttgttatctacacaagactagagaattagaaaatgaagtctgtataagatatttttaaatgtttctctttttgaaatgtttgctttactaaaagtatattttctaatccctaagcatatattttctttatgtggctgtgattttccattttgagagtcattgatgacaccagcatagacccatagactccagcatagagtgctgatcagtgaacgctctatgttacttagagagaagcaaggcagtgctggccccaccctactgtgaggttttctaaccaggattctggtttataaaagagctatctgccttcagtgcaggtgtgtcctgtttgtccctacagagagcctacccgacatacttggaagaaaggctgaagtcttattttggtcattggtggtttcacaagaagtgtattttctaatctaggtagaaaacctaatggtaaatctctaagcacagcatcctgattgatctggatctcctgtgccctttgaaactaagctaggctggtgtgaatagtggtgtgaatagtggtgtgaatagttcttagatgggaaatccaaccacatatacggccttgcaagaattttttcttttaagtgatacttagatgcactgaatccaggagaagaaataacactttccctaccttgagcacgcatttaaacttggtttacttgtggcatgaaatagagttcactgggttcttaggcacaggccacatttctatcctatgacagctttgccacactaaaggacttataaatgcagcagacaaatgtagagaaatgcatgactgaatttaaaagtggatctaaagtggggaatgactattagaaagaattaaactggacatactggtgtatgcctttattcccagaccttgtatttgggagatgaaggtagcaagacagaattctaaggtcatcttcagctatataacaaattcaaagccatactggctacattattcattactatgaagtaagttactagaaactttctttagtcttggttttgatgtattctctagaatgtaacaaacacgtttgattttatcagtttcttttttttactaaggtggataagttagatagaatcccaagattaaaaccaaaacacgaatccagactaagcccctcacagttgaggtttgctttcattacagctaaacattgaaagtgcttcttagctttgtctttcccaatgcactttttctttggtttgtccttgttgcagccccatgccctggaaactgacttctcagacctgttcaaagggaggatggcaacagggcctttccactcttcctgcctataattagcagcacattagtttaagaaaagcaatcagtgccatctttagttgaagttcactcaatattaaataatcatgcttgtattcagagagcgaacttcttagggggaaaacagtctagatggactagaatgtggaaatctcttcgcagaaccaagtgatgtagtttttgctccagagcttaattatgaacagacagtatctgattcagagttatttacagttgtgtgtgacatttattagtatttgaaaattgtttttttacaaaatctgtagttattatgaaatcagatataagttggatgcaaaatagactaatgagtatataagcatatttatgtaattttgtgtgtttgctatttcttagggaattttatttgttgttttgctttttgtttcttgtttttttttgtttgtttatttgtttgttttcttcctatttcacatttactataagaaatacctacttagattcatggcacgtatttgctttagtcagttattgacgtctctactcagatttggtgctgtgtctcactaagtcactaatgtgggcttgatgctgttgctttttagatctaaggacttatactccagcgagtgctatttgcatttgacaatagctggggatattattagttattgattcagtttttcataaaatattgtgtaatggctagagtaaaaaaaaatcctgtttatagaacgtcttgtgaatttttaaacagaaataaatacttcagtgccatgttcttgtatgcaagttttcaaatattattttatttaattgagactgagtctcactctagtcctggctggcctgatacttttgatgtggtccaggctggcctggaatgtgtagagattcacctttctcggattccctgctgggcttaaggtgttaataaaagctaggataaagggattaatgctgctgtgccttgctcaaataacattcaaaaatggaatttaacaaagaatcagttacattctagataacaatccaggtcatttaaagaacatgtggctcatacctgcctagagttatactttgcaataatgttacaaatgagttttgatccggtaggatgttttgaattatgatggcttcttcctgatcgcttaccttacagggaaatttcatatttacatttcatattgctgttgctaccttactgaggattgaatttagggtcttgtgcatgttaggcaaatagttacccatggaactacatacgagaatctaacctatattgagatgataacattcttacatatgtagtccatattcatagtatgacattctgttactttaaaatataaatagtacattttaaaaatgagtaaattccttgttagagtctgatgaagccagtatggctttgaatttgttatttaactgaagatgaccttagaattctgatcttgctgccttcatctccaaaacactagatctgggaataaaggcatacaccaatatgtccactttagttttttctgcaagactctggatttctctgctacctgtgacaagtattctaccatctgagtttatgccttcccatcttgtaaaatttagtgttacttgtattgcataaatctacctgtatcgaggacacgtttgtagaattgtagtcagtacaaatgtacaggaggtttataagattgcaagtttgtttggaaactatgatttgaggtcctgttctgtgcctggcacgtggtggataaaagatctctactatcacaagacaaacttaaatcctcccctacccatttatgttacatcacatgaagggtactgtctatgatgcagaggaactattatgtatttccctttgcatctatcactatgtgcagaaaatatggctaagtctttttttttttaagtttacctttattttcacaaagtaccccttgcacacgggtgtagtcacagggtttcccagccaagagctcagtgtttgtgaccctaactctttgtcttacaccaacaactaccctgtggattttaaaagattatgtcctgcaatttgtagttgctgttttgtttttggggttgtttgttttttagttttgagggttttttgttgttgttgttgttgttgttgttcttcagagctgaggatcaaactggggccttgtgcatgtggcccgattggcaaatatgttaccacggaactacacccggactctgttttaatgttaattattgctgtgtacagaattctgttctccatactttaaggccacgattgttctttaatgtgtatgtgtcatcgcgtggttatagacatcctgattttctccggtttcgattggctccttgtggatggatcatgtcctgttcaccattgtctgaaccatattgtcgtaggtctccactgcatattgaattgaattgaactgaaggactaactgcgtgggtagtgagaattcttttttcatacattcaagtacaggttgccataattgtctgacatctaacccaaatatctgctttatgtttctgtttcatttccctttgagggatcatggagactgcacatttgcaacattagaactagaccctagttattacattagagccctctaataaatattaattgatactcctatctgaaaatacatttctcagcaatgcctattcagtatgaatactgagaaattacttggcattgttcttgttttatttaaagagaaattcagagagcacaagcatgtggtgaacagcgtcatatagctcagctctctgcacccagttgcttaggtaatgcttgtcttccttcttggaccaccagaccttagaccacctacagatatcaaaactatttctaccttgagaagaaaacaaaacaaagcatacatggctacagctatgaaaattgctcaatagtagagtaccatgctcgagtccttgagttttaaatcccagcaaaacacacacacataaacacacacacacacacacacacacacacacacacacacacacacaccatacagacaaacacagacacacacacactaagtaatggttaataatgattgctcatacaggacactgatacttttgaaaaatcttatgaagatctgaagaattaaaagaggcttagagaggacaggaggaatcttctagcaggtgatagtcccttggaacgataccctgggaactcctttggcttaagtttgtaaaggagatgggaaactgggtgtttggaaacagcagcagcagctgtcatctgggaagcgtgtgcttagttttcactgtctcagatttttctcttgtttattcaaaatatggaggacgtacacgaaggctccatgtgtttgcatgctactaaggcagaggtgttggtttctgaagcttaagagatctgtgtgggccatggaaataggagcagcagcagcagaggcactaaagagaatgctagagggcacagccttgagatcccagaatcttggaggctgagtcaagagaaccacaagaacaagactagtctgggttttatagcaagaccctgacagaagcaatcaatgaacagaatcaatatcaggaacttagaaagagagagagagagagggagagggagggagagggagagagagggagagggagagggagagggtgagggctttttctttgttttgtttgttggtttttggggtgttttcgtcgttgccggtttgtccccgtcccccctccggttcggggtttgtccgcccgttcccctcgtcccgcccccccgctccgccggcccgtgttccccggcccggtttctttcttctttccctctttttcttcttttttttcttttttttgtgtggtttttttgttgtgtgtgcggggtggttgttgtttttgctcccttgtttctctttgttcttgtggtggtcttctggttcttgccgcgttctttttttccctccctcgcgcttttgtcggtttttttttgcgcgtggtggctcccttcttccgcccccgcgtccgcgtcgccccctttttccccgcttgttgcccgcgttctgtgttggctcctgtgttccgttggtttcttttttttccgtttttcgtgtccttcgtttgcgtttctcgtgcgtggtcgcctctttgttgttgttctctttcgcttccgccccgcccccgttttctcttgtgtttcggtgcgcgtgttttcccccgcctctttccggtttttgttttttgccttgtgttctcgcccttttgtccgttgttctgttctttaaaaaaaaaaacaacnnnnnnnnnnnnnnnnnnnnaaatcaacaatcctgttggcactcctgatttctagtaagtcagtttttactagagtacagagttcggtttgagatgatattacaagttaacgacagcaatattttacacttaagaatgaaatacgaaatatgtagtccatgagagttcttgcagtctcttggatttttaaaagaagattgtatatggcgggagaagagaaaataaaactgtgaaccaacacacactttcttcaaaattgtttgtgaaattggaatacgatagtgcacattttcttgtttaaaaaaagttgtttttatattctgctgtcttagaagcacaaaatacaatagacgtaaagatgaattgatgcagtatattactatgtccagctctcttttttaaaagatctacttcaattatactatatacacaaataattcttagtttactgctgtttagattattcacattagctgtgatcaagatccataagcccgtgtaaggttctggataaatctggactggatgcacgcatccccttgtcttccctttccgccctgaacttttcaacgctgacatttagtgctgaggtgtaagaggctgttcttcggatttcctctagctgcagacttgccagcaaaagttctgtcaaacactatcaagacctgcggactcacttaaaatgaccccttcctggaagatgtatagataacaacaaagtcaacccttagcactgccccttcccctttgagaccagggtcatgctgtgaagtgaacttttatcactgtttgaggttgtttttctctgtcctcatggacacaacagccttactatgttgattcactatgactttccagtccttggcacagcgcagactgtcaggtgatgtagctgtctcccgtctcaattcacagtcctgaagtgaaaccgaagaacattgttctgttttgctggatatttctgtctgctttcgacttctcctgttgtgttttccagcaggataatcaaaccctgttttcctttcttaaagctctacgttctttcgtccactgttttattgtagattaaaggctggtacattagaaggttatcagttaatcaataagctttagtcatgccatcttgtgatgaagatatccattgatcaaagtggaaatttaggccctgagcttttaaatggcaatttctgaaggttaaaagagtgttcttgtggaatgtacaggcctgtacctgtatttatattcaaatggtaggcatgaatttatgcatatgtataatatacacaaacccatatataaatgacactatctgcatgttccataaaattgtattcacatctctttttgttgaatctttatcagcaactctctccacattgtgtgtgtgtgcacatatgtgtatgtgtgaatgtgcatgtgtgtgtgtgtgtgtgtgtgtgtgtgtgtgtagagcaaaaggaggaagcagaggaggaggaggggaagagagagagagagagagagagagagagagaaagagagaggtcttcatataaagactaattagtattgtaatatcttctaagccccttgtgattacaaaacgggaaaatatgcttttatctatatgatttatatacttaaacgaacatgaatgacaataagaatcatcatcttcattttaaccaaattcagaatgtcctttcgtgacctttatactgtggcttttgtttaaagagaaactacttaagccagtacccttccgcagtgccaggcactgagcacaaggtgctatgagtactgtcctagcgttcaacactgaccttttgcatctcctcagcacccgagatgtcatggagcatcttcacattgcatatctggttatttagccaagtgaccttggtaggtaggtatacttgtcaagactcacactacttcattgtctgtcacagtctcatgacagcatcaagacttattaccccacgctattttcttttctgtacttggaatcagattcctagattggcattcacggagttgttattaatgtttgtttaagtgagtgggacatacgagaggatttcggatacatgcatagatagatgcatgtatatacttaaatgcccatacactgcagtcaagggaatggaaaacaaaaatgcatttttttttatttataggactcttcacgaaagaacaaactaatgcatacgcagaaagcaagggtggagtaaacagcactctatgttccttattaacctatgaaaatctctaccctgtgctttgaattggagagacatggttaagtcctgtgtatgcatgacgtcagcttcaggacttctgaatgtttgcttaacaaaataatgatgctcccaaaagggaattttaaaatttttagtttggaccctgtttatctttgaacaatgtataattaccccaagacatttgttaatacttgccaaaattgattgaatgccacctttgttatcatattttatctgaaactgctttaaaacgttcttttttgttgttgttgttacaaatagtattgatgctatagacaccaaagccataattgctgtggtttcccccagggatttgaatccagtatactgaccctgtacaactgtgttcaaatgtctgtagttgactagatatgtggcttggaatgagcaatttacgatcattgtgggtcaactctcagctgcataaaaaaggactaagtgctaacattggtaggtgactcccatgtaaaatgagaatatatctgtctgtttctataacattgtatgtgtttgtataaaaatctatacatgtttggttcatagaggacaccaaactttaatcctgtataaaaaatatagtgcacaaactatttcaggcatactcttcctattatttaagtgagctcactgtgatcagcttcccaaattatattatatgttttgtttgcttgcttgttgccatgctcaggatttgtgtgtacaactcctagaccttaggacacacctgcaaatactgcatcatggttgccaggagagtgatcctctctgttaagtagttcaatgcatagtcactgtggcactgagaagaaactcagaaagatagtctcaaacctatctacatgctgatcacaggaattcataaatagaatgtccagctagaaccattctgacacttgttacaccgatcccagttattataggacctactaacgtcatacgttttagattattaatactggttgatctaggacccgctaatttgtgagtctagtaaaattgcttacgacttcagtgtttttgttcattttgaagtcgatgtattcattgaaggaaaaatgtgttgttttttttaattaagatgcaacctttataatgcaatgcataataattatagagttcactcagcctgaagaaaaaattttaccagttaaatagtaataatcaagataaagactgcattagaagggtgttaattttatgatcatctcaatttaaataataaaaaatccacaggacttttgctgtgatactatgtcaccaaggctgaactcagttttgcatgcagcctccttgaagcctatttaacaataattggctgctgaaatggatagccaaagatcacccttgtacaatagatacttcctcggctgttaagactcactgtgcttcagaaggacaagatgtgtttgacccaaagtatcagggtgatggctctgagcagaatcctagggaagatcaagaatcacaggaaaacaatttaaaactgacgttcccacagttggagtctgcgtgttgaatatatttgggagtagatgctagcatttcaggactatttagcattgacataggatcttgaaacagctactagcttagactgtgacaaatgtggcagtacatagtgatgcatacatagtacatagtcaaacttagctctggaccaccactgcttcaggcttctaaatgaaaggtcaaagtagctgggtggataggagcagtcaggggctacattttgtcaagggcttagcacctagtctggaaaaactcaggcaccctgtggaaggatgatgcaccagcatttattcaatatgaattcttttgaaggtcagaaaattttataaggtacaataacagcagtgattatttagatagtagtgatatcaatacaacagtcgaaaagaacgcgagatgattgtgtctaactgatgcagcaatcaaagactttgctttgtaatgtcattccagatctacatgtgaggagcatagcttccctaggttggtgtagttctcattagagagctgttcccctcctcctgaaagggaacacgatgtaatcacaagttcactccaaagttatggaagaccctgcttgtttggtttgtgtggcaatgttgtctgcacagggtgttccaagtgttctctttattatattcatggataccaattggataacaacaacaataatgacaacgacaatgtggtttcctcaagcactcactcagcatttttaagccagacttaaatcatcacgttttagaagttatttggttttacatgcatggttagaatccaaaattaaatggttgttcacttatattagaaatagttcatatgtaaaatattgatatacaataaaatattacacacacatatatatgtatacacactcatatatatgtatatatataatatctatggggagagagaaagagagagagaatcttgattcctgctttcagaaggcattccgagaagcttgaaggaagcagggaagtacattgggaatatgtaaacaacaagaaggtaggatatgttcagtgattgatggaattctgccagtcaggctcagtgtgcctcagctttctttttctttggtgggtttgtgtgcatatacatgtgtgggtgtgccagggctcacagatgtgtgcatgtacatgtgtgggtgtgccaggcctcacagatgtgtgcatgtacatgtgtggatgtgccaggcctcacagatgtgtgcatgtacatgtgtgggtgtgccaggcctcacagatgtgtgcatgtacatgtgtgggtgtgccaggcctcacagatgtgtgcatgtacatgtgtgggtgtgccaggcctcacagatgtgtgcatgtacatgtgtgggtgtgccaggcctcacagatgttcagagggagttgtgggagtcagtcctctctttctactgtgttgcttctagagattgaactcatttttcatactcggaagcaaactgagccaccatgcttgcctcccctattctgctataaccttggcaagtcaccagagactttattattagcacaattatgatattcacaataaaaccccagcatagatttatggtgcagaaatcgagatctcttctttgttggatatttattgttatttttttcctattcaaaataccaatataaattggaatagttgagaaaagcctcatagagaaactaaatcatgctcttgaactaccatacaggcttataaaagattagaaatgacaggaaccaggggattgcctacccaagtctatgattgctggacactgagagttcttgcctaggactcactgggtgttagatgttccttaagatagctgatttttcacagtaatctaacttttagtgaaaactgtcatgttcttttttaaatttttatttttttaaataattttaaatatttgaggcagggtttctctgtataaccctagctctcctagaactcattctgtcgaccaggctaccctggaattcagagatccacctgcctctgcctcctgagtgctgggattaaaggtatatgccatcactgtcaggcctttttatttttatttttatttttttgaggaagaaaattatgttacagagaagttatatttgggtccactatggccagctttagatcttcctcaagaatatattcttaaccagagtaaggctgtcaaaactgaggttttttttaaaaacaaaggtgtttgctcaaggcaataagtagtgctaacttgggataggatagaagtagaaattagctcctcttggtatagaattttcaagatatttgtgtttgccactcattttgttcatggagggaagaaggtctttggggtggctgaagaccaggtgttgatgctgccaacaggcaagcctgtttcctgtctttcagagacaatagacactgtgtctgagtacacagacgagcgagcgttagacagtggggagaaggcagatggagattcgtcctttggaatacatcagattgaatgaaatagcaaaagcattatcagatgtagttggaattcatttgatgaacaaatgaacctggaactatctcgagatgaagtttgctgttctgtaccgagaaggagaaagaggagatataaaaccagagagtttcttttcaagtgtactttagcatatcagcacacctgtactcaaaaatacatattaaataattaatatactttgggtattttctaaaaatttttaaaaatctggtgagataatttgaagaaatatgcacttgctaaaattcatgcttgtgtagtaagggaagaggagaagtaggctttatttgacctttcatcccctgcacaccctcaatttacaaagctctatttacttcaaagaggccaggaggagaatgcaaaacagcctattatgtttgtgatcctgggattgttttgctgctggtatccatgggcttttttcaaagcttatcttttctatccttttttaatttgcacacttggaagcagagcagagtgctttttcattttcatattttttgagtttcttgaaactatcagttacaacatggactgtataataaacacccgccccacaccttgtctttacgtgctaatataagatgctggatgtgtcaactctctacagcatttaatgcacctattgggccacttacaccttaagtgacatcaaatgatcctctgaagaatgagattatgattctaggggaaaaacaaaaagggaaatgaagggggaaatccattctatatacaatctcctacatcatgctgtgctggtaaaaaaaaaagaaggctacttgtcactggcgttctctttgattactaaattataggaaaataatgtgcctgtagtcatgatctgtcatagtcattatggtgtctaatttagtatttaagaggcccaagtggttaactttaagtttaagtaggtcaacatagcaataaatacacaattttgacagttttaaaggaggcagctaaccattagaagacctttttgtttagacatgccacttagactttatctaataacaatcacatcttagcattcaaaagttcacaagctattagtaactaatatttatttgagggaaacttgagaaaaggaaatcagacgtagacgctgttttacagttaatgcctctgtacacagaacaacagaaaatcttgccttgtgaaaggattactgctataagtgttttcatgttatcataaaatgggccactcaagagagaagtaaaatatctgtagtatccaaatactcttgtgtctgtggtagggttttccatttttgatagctcctggacatggtggctgccttgctatacattatactccaaagactgtgttcatagttatccaatcaaagtaaaaggatacataatacatgcacacacacacacacacacacacacacacacacacacacacacacactggactcttgccctgacacttttgctatgaagttaaatcgtgtggcaggcgagatgtttctgttcccctcatgtctggctcagttcctcatggttcctattatatggagttgtcctgtcctgcagcctcaagggactcgtgggcagtgtatcaggaaggctccagagtaaaacagcagagcaagaaccccgtagactagcctctgagaaattacattaataaagtataataaaagttgtaaacatcattttctgtacatttttttggaagcatctcttattctataaatagagcaggaatcgagtctctctgtacattcaagtaatgagtgtttggataatacttggctatgtgctctagctactccaacagttacacaagctatcagctaagtcaactactgtaactttgtatacatatatcttactgttaatctctgtaaggtactgaaattagaattaaggaactaaatatccactcacagagtgcttatcagtaactgttcattttcaagattgtgaagttagatagagtgctctcttaagccactcccaaaatactgtaatgtgacctgtttcatttgcaattgtaactcgatgctgggtccactttaaaatgagagatattatatttcagtatcagcttccataggggctaagatgtgttttagctatggaaatgggatctgtgtatttactgattgtttacactctgttcttataaagtttgtaaagtcagattcttatgtaagtatcttaccatggtgtttgctcactgctgatctctctgttatggctaagctcatccaagtctcctgtttggtttcctttattagtgagtttgactgtttgcttcgtgttttatttctatagggtggacttgtcagtagagacaaactgatttggatgtcactcatgtagtagctgtaactatttatcactttaaaaaaaaatgaaaaaatgggcaagggtctgattggctgaagaatgtgcccctcccaatcgtactctattcttatgtacctcatagttctcctttttggggaggtcattctttgagtttgagacatgctcatgctgtagagccatgttgtcctcagacacagagttctgcttcagcttcctgatggagtgtgtgtgtgtgtgtgtgtgtgtgtgtgtgtgtgtgtgtgtgtgtgagagagagagagagagagagagagagagagagagagagagagacccagaagagaccagagagagagagaccagagagagagaggagggagaggcagtgaacaccactttcccagagctaggaagctaagagtgcccttggtttctgttgttgttttgttttattttgtttctttgctctgtcttgtttttgtttttttaaagatttatttaattttattttatgtgtgtgaatacttcccctaaatatatgtgtgttccacatgcaagcttggtatctataaagaccaaaagaaggtatctgagcccctggaattcgagttacagactctcgtgagcaccatgtgtgagatggaaatgaaacccaggtcctctccaagggcagccagtgcttttaactgctaagccatctctatnnnnnnnnnnnnnnnnnnnnnnnnnnnnnnnnnnnnnnnnnnnnnnnnnnnnnnnnnnnnnnnnnnnnnnnnnnnnnnnnnnnnnnnnnnnnnnnnnnnnnnnnnnnnnnnnnnnnnnnnnnnnnnnnnnnnnnnnnnnnnnnnnnnnnnnnnnnnnnnnnnnnnnnnnnnnnnnnnnnnnnnnnnnnnnnnnnnnnnnnnnnnnnnnnnnnnnnnnnnnnnnnnnnnnnnnnnnnnnnnnnnnnnnnnnnnnnnnnnnnnnnnnnnnnnnnnnnnnnnnnnnnnnnnnnnnnnnnnnnnnnnnnnnnnnnnnnnnnnnnnnnnnnnnnnnnnnnnnnnnnnnnnnnnnnnnnnnnnnnnnnnnnnnnnnnnnnnnnnnnnnnnnnnnnnnnnnnnnnnnnnnnnnnnnnnnnnnnnnnnnnnnnnnnnnnnnnnnnnnnnnnnnnnnnnnnnnnnnnnnnnnnnnnnnnnnnnnnnnnnnnnnnnnnnnnnnnnnnnnnnnnnnnnnnnnnnnnnnnnnnnnnnnnnnnnnnnnnnnnnnnnnnnnnnnnnnnnnnnnnnnnnnnnnnnnnnnnnnnnnnnnnnnnnnnnnnnnnnnnnnnnnnnnnnnnnnnnnnnnnnnnnnnnnnnnnnnnnnnnnnnnnnnnnnnnnnnnnnnnnnnnnnnnnnnnnnnnnnnnnnnnnnnnnnnnnnnnnnnnnnnnnnnnnnnnnnnnnnnnnnnnnnnnnnnnnnnnnnnnnnnnnnnnnnnnnnnnnnnnnnnnnnnnnnnnnnnnnnnnnnnnnnnnnnnnnnnnnnnnnnnnnnnnnnnnnnnnnnnnnnnnnnnnnnnnnnnnnnnnnnnnnnnnnnnnnnnnnnnnnnnnnnnnnnnnnnnnnnnnnnnnnnnnnnnnnnnnnnnnnnnnnnnnnnnnnnnnnnnnnnnnnnnnnnnnnnnnnnnnnnnnnnnnnnnnnnnnnnnnnnnnnnnnnnnnnnnnnnnnnnnnnnnnnnnnnnnnnnnnnnnnnnnnnnnnnnnnnnnnnnnnnnnnnnnnnnnnnnnnnnnnnnnnnnnnnnnnnnnnnnnnnnnnnnnnnnnnnnnnnnnnnnnnnnnnnnnnnnnnnnnnnnnnnnnnnnnnnnnnnnnnnnnnnnnnnnnnnnnnnnnnnnnnnnnnnnnnnnnnnnnnnnnnnnnnnnnnnnnnnnnnnnnnnnnnnnnnnnnnnnnnnnnnnnnnnnnnnnnnnnnnnnnnnnnnnnnnnnnnnnnnnnnnnnnnnnnnnnnnnnnnnnnnnnnnnnnnnnnnnnnnnnnnnnnnnnnnnnnnnnnnnnnnnntgtgtgtaagtgtgtgtgtgtgtgtgtgtgtgtgtgtgtgtgtaagtatgtgtgtgtgtgtatgtgtgtgtgtgtatgtatgtgtgtgtgagtgtgtgtgtgtgtgtgtgtgtgtgtgtgtgtgtatgtatgtatgtgtgtgtgggggggaggtatccttgtcctgaatacatgtggatataaaaggacagtctatgtcacttctcttcttctcggtatgagtcttggggattgaactcaatcctcagctttgatgccacaaccatcgtccttagcctgacgacttggtttttttgctttcttatgtttttgttttgttttgttttgtttgttttgattttggtgagtaaaatttacaagtggtggaaatagttggttggtacttatcccacaagaacaagcctgttagtatttggcaggcttttggaacaaatgcaatattattatctcaattttgttttgcatattactatggcccatagttaacgtaattactattaaattttaggttagatttttcttgctaacaggttaattaaaaagagaaatggaagttccatctatcacttattgagtctaagccatacaattttgatgttgccatctgcatttacccttttctttcctgtgtcatatttatttcctctttttttttaaaaaatatttggagcaataaataatgaagaacaaatttatcaaacttttctgaggtatttgttagaggtctgctgtattgtctgctgaggagatcaccctaagatcggctctagatgttggagaaggttcgggtgctccgttctttctgtgatgaggaggttttcacgtttgcatagtggccgagtaagctgtccttggtgtctggattcacaggtccatgtgtttcaagattcctcagaatttctttatgcagaagtgagagataccagcaagtgttggaattttccaggctatacccagctaggaaaaataacttccttcctagtcattcccaaatccctgttacctattgtttgagagaaaccacaaatttcagttcagagaagtaattgctcgttggggggattttgtggatcttaaagattatattaaagcacagaggggcaaattcagtagaagaaggtttcccggttcagaaaggtcattgttaggacttcatttagtaggacatgttcaggggaggtgtagattcagataaattcctcttaggggagtttcatttcgattgattagctctctttctccaatagctgcagcttgttctgttttgttcttggcagttggatgtggagtgttgtatgtttgggctcatggcacagaatttgtttccaaaaaaaggtgtcacgctgttttccatctactggaccagtaggggtaggaagatctgactggaagccaaagtgaaatgcaaaagtgatttgctttggatagttcctccatcaggccctctttttcctgctcctacccttttccagagagaaagaccagcttcctcccaggatacttttgctgccaattagactgggaaggtgaggatcatttagcaccactaagctgaaaagccattatagtaagtttgggcatgaaattcaaaggagtgaatcaacatattgtacgttcagcccattaatgatgcttttaaaattaggaatataacattctgggtttgatactgcttgttttgttattatgataatatctttcttttccatatcaactagaaagtaggtggtccatgccatcaaatttaaatgagatttgaaacaccttttaaaacagcgagtgctttaaaatgtcaaccatattgactgcacagctttctaatgtgcattatgaacactccttgcttaaatacagtacttatacctgatttcatttttttcataatggttaagggtcactgtgaatgtgagttactattatttccatagtgcaaaaatgcccagagtagagttcggtgcctattttcacaatatggtcccagaaaaacataagctccaaagtcttgtatcagattttcataatttttctctaattaatctatttggcagtagctctgctactcatcattattggctgaggaagtccttgaggacatagtccattgacataacatgtatgattagagctgctgagaaagagagagacacagaaagagagagagagagaaagagagagagagaaagagagagagagaaagagagagaggaagagagagaatgagaaaaatatagatgatagatggataaagagatagatgagggatagacagatagatagatagatagatagatagatagatagatagatagatagatagacagatacacagacagattgacagaaaatgtgagcatgtataagtgtgtctacatatggatacattatgactatatgtgttaaataaagggaaaggcagttacatgcttagcagataaacaggtgaagtgagctcagtagagatattgttggagattgggatggtagcaaaagatagtgaggcaaatatgaaaatccaggttttcacaagtaactaaatatatctgaacccagccgaaatgttagcagccttagatagagttcattagatgtcgtgggaaaaatcattttcagtcaagtgagacaagtccacattgcatccccaccagtcactgagcagagggatgatacatgaaaaccccaatcgcagatccatactattctgttaagttgtataccagtgctttgcaatgcacgggaagttgtagtaacaagtctacttttgaggaatggctgtcccaggaggtcacatcttcatcaagaagtccattctgcaatctgtgaggattctgggcttctatttccacattgcattcaggtccctgtgtgtgcacatgtgacgctggatggaggtgtgagttccagggtcacctccaggaccttatcaactgtgtcacctctgtttgcctctgacagaattatttagaaatccttgaaatgaagagcattttcagttactgacaggagtcaccgaagggtcaggtcctatcttcataaatgcatgatttcactaagatgctctgttgacagcaggtatctgatgtgccccaagctggcctgctttacactctggccttcgtcttatcatttctgcaatcaaagggttctgatgattaaaccaacactctcagtctcaaaacttgggccatacataacatcttgacctaaaagaattctgaggttcagaacaatggttgtttctcatgattactaaatatcgtttaagttgtgaaagcatcaaggagcccactacagagtggatctctgaaacaataatatctctgaacattttctggctcttttttttttctttcttataactatttaaggaatcttatttaagaacgaaatggacatcacgtttctgtgctatgatctgaatttctgcctcagagatattatagatgaatatattcgcagagtctgtaaacaatggaaaatcatgaaaaccagaatcagggttcctgcccttaaatgtgtttcagtttgcattttgatagcggtttagaaatgttatcgcttgttttgtcacagacataattcacatctttcttcaggcactgtaaacaagagaaatggtttaatggccccataaaggcactctgctgatagcagagattaggctctttagtaatggatgccagtgtgtgtgtgtgtgtgtgtgtgtgtgtgtgtgtgtgtgtgtgtgtatgtgcacagtgagaggagggagagtttgaagaggcaaatgtactgagaaagaatctctggagaggcttacgagcagcttgaagacccctgagcttccttcctacattgtgaggtgtatttacagaacgcttgacattatcatccttatttgtacatacgccttcccctttgcttctgagatttagctgaggactaattgaggtcatcaccatgcatttatcacctgaacttgaagtgatactaacttaaagggagtgcttcttctactcagtgtactccgaactacatttattttataaaagtctgcatgcatttttcatggcgggcttgtatctgctcttaaataatctaatttatgtataccatttattttttcaccttttacagagttttttttttccttccaaagcacttccatagcccagtattttttttttccataagcattttgatgtctgtaacatgatttgtttttgttttgactgtttttcagttatattttctagacaggtgtaaaagatttctgcatgttatatgtcatcccagactaagtaagtgccttgaaagtcctcacacctcataaatctgtagtgttttagagtatcaattttatgccatttttcatcagcttgtttgtgaattgattactctgggccacacaaagtgttaccagaccacaacaagctgacctttgttgaccaggttgacagtgcacatgagcacatatcgctcggccagcttctttcatgtttgctttctcccttatcactatagaacgtgatctgaagcaaggatctgcaagctgttctctggaaagaatcagatggtaaatgttcaggctttgcaggtccatcattccaactcaggtctgtggctcacactaatcccagaaggccctccagtgcatttataaaaacaagtagtaagttgtaggggtcacaacctgtcctttgaagtcctcatgtgccatactgtagattaccctaaatgtcacgttttggcttggtattattttataatagttcaggggtctcagcaccagtggaggaggctgcactcttggcttggttctctttagaaactgtagatttgcttcaaagacctgtttctcttttgacaagagctaaaaataaaggtttcttctcctagggtaaatactttgtattcctagaaattattattccgtttcactcttagaaaagttaaaaactaagaagagtgaaagcccagagcccagcccacttcctgcttctttacattctctggagatgtctagaagtagacttgtatgttgcttgtgacttttttttttttttttttgtaatcccagggtaaggcaaactcttagtgtgtaagcaccatctttgcttcagtgtaatatgagtagtgtgaaattttaaatgtcttggtcacagtaataaattgaaggaaggcagaatgcctaaaagcaaacacaaatgctctgagaaatttttgcatttagatacaagtgccaagaatatattagtaaggtcatgcatacagctgtgtgtatcacacacacatgaattaatcaaacataaggaatatagaacaggctaaaatctttgctagaggaaatatttttcagaaatctaaataaaactatgattagacctatatttgcacttgatggtatgaagtcatctttttcaacacctgcactccatagctctcagagctccagactaccatttaaggcctagtagatacaaacagggaaggaatgacgggttcaaaaacatctgatgtgattttatacaatgttatagtgtgttctttaacaagaaacatttcaagtgcaaatgtaaacagatttttaattttattgcaaccaaaaacccaagattcatttaaaaatttttgtttgttactatttttaaagtagggtgtcttgtagaccaggctggctttgagggcctggaacttcagatccattcccttccacctccctttgcatgcaataatattaactttttagattagatacattgtactttacatgtggaagtttttgcctctgtgtatgtctgtcaacatataggcttgatgactatgaaggtcagaagaggagactggctcatctgaaactggagctacacatagtcacggaccattgtgtagatgcttggaattgaacttgggtcctctgtaagaacaacaagtgctcttaaccactgagccacctcttcagccccaggctctaattcttaacctgctttaatgttgtctgagatctttatccaggcattctgcttggattctttatgttattttttcaggtctgtgactaaataaccaatagaatgaacttaaaaggtagaaagcttaatttggctaatggcttcagagattttagggggtaggctatacatttttaatctgtagtgcacaatacaacatatcagaagaagttttttatagctgggaaataaaagaggcaccaggaccttgaaatcttcctcccactaggacttattgcctaaagattccctcttcttacaaccatgcctcacactggggaccaagactgacatctgagcatttgagcaacagtcaagtccagccttgaagatcacaaaatactatgtaaatctgagttattttcaaacatagctgcagtttcttattcagattgtaaactcagcctcacaccaaaactccatttgtagatgactgtttagtggatagctgtcacaaacatcttctgttctcagcggaacgttacaaggtaaggccttcttgtcatgactaaggaagtattctcctgagagaatgtaattcattctctcgacctacgagttgttttatgttgtctttctgctcaatcacgagttcacatttaaattaggatccttgcttgtggaaacctaagagcgcctcagtgcttcagtagatttgtgacggaactctttcccttctgaaatgtgggtagaagaggaaaggtactaggccctgtctcatcattcacgctcttcaatgaaaacaatcaccgaatgtctatgcagttaaccatgaatgccataaccacttcttgcaaaccctcgggttaggaagtggttaaatttatttttgaaagtgcatatttttaagtcctgatattttggagctcttaaatttaaccgttagacaaactcagtcatcattagtcagccgtacgacgtgtttttaaaggtcaagcttccatcaaggcatagaatgcaaagcccatctcttgagtgttctatctacttctccctagaaaagctgatagctgtgtggttgtaaaagtttgcatgggaaccctcggaccctgtttgaggaatgcctgagatgaactctaaatttcatacttagataaacgatccgaactctatgaagtcaggaataaagtatcatttggaaacatcatttcttcgtcaatgaaatgaagaggctaactcgcttgatttaattcccttgaaaaaggaaagattcactttaattaaactacaaacaatgccgatgcctgcaggtctgtgttccggacccagggaggaccgcactgtaagcggaacgctagcagcctcagcagcaggctggagccgtgttcagtgaaagtaatttaattagtgttgatcatgactccagatgatggtgatttgataaggaataatttagtacttaacagccttttacatgcaccagctccatgtgggaaggtacagcaaattgcacgagatgaatgtgctgctttctcttgcgccggtgccaatgatctggaaaaacctcctattagcagacgctaagcctcgagtcctgggatgaaatatactgtaggcagcctccaactcagcctgtcctggtgggagtctctacatctctcatgcaaaggtaaataagagaagttgtctacaggaagtcataggtatgattcccaggagggaggcaagctttagtgagctcaggtcataaacgatcttgtgcagaaaaatcgaaggcttcggtttggctttaagtttgatgcttcacctacagatatgaaaaaaaaaaaaaagataaatgctgggtatcttagatcgtcctgttagtctttgacttgggactagtaaagaaaaatcaattcttggtccatcatgattcacagccccacaggcatagaatgaggttgtaaagagagtggaaaccctccactggtattgctggggagcttacaaggtggagagagttctagtgttggcatctaaatagaattttttcaagtgctgggtctatttgaacacaatgtgcactggtggagccatgcctcacattggacgcagcatttgtccggttatgataatcacctagaaattcttgtagcctaaaatcattacttggccagcttggtgacaacacttactaggaatgaagcattagattaaggtgcaataacaaggtgctatgtactgggtggcttaaacaacagatacggcttcgcttcatcttcagtggctacagagcaggatgaagatgtaaggaaggttctgaggagtaagagagggggannnnnnnnnnnnnnnnnnnnnnnnnnnnnnnnnnnnnnnnnnnnnnnnnnnnnnnnnnnnnnnnnnnnnnnnnnnnnnnnnnnnnnnnnnnnnnnnnnnnnnnnnnnnnnnnnnnnnnnnnnnnnnnnnnnnnnnnnnnnnnnnnnnnnnnnnnnnnnnnnnnnnnnnnnnnnnagagagagagagagagagagagagagagaatctgctctatgattgtccgcagtcctttccactttcatatccttctttgacatttctgggtttgctgcttgatcgctgccttcagtgtcacacaatggtctctctggaggtcacgacttttgtccacatctccccttggtttgaaggacgctagccatggagatacagcccatctcaacaacttaatttaactgagccgccaaacaaaaccacaggctagatgcagagggaaatctttactctctctgctagttttgctttggaaatccacagggcttagctgcagagctgtgagagagcatctgtggttttggatgcattggaaggggctttattccttgttattcctaaatattctttgcatgcagatgccatactttcttatctccaccaatgcatatttaaaacctttttagctttctttacataataaaacttccacaaacattcctacatatgtcttttggggagcatatgaactccattctcatatatacatacacacacatatagggacatatgtattagtgtaattactggaccataatacattcatattgcagctttcaggcagtctcaactttttctgaggggcttgtacttacttcccttattttgttcaatatcaggattgtcaaccttttattatagtttggtttttctaatgagcatttggtgataatcttgtcatcatattggcaatttcctgatgagcaaaactttgacttagttttcactcattttgctgcctcctgccccatcttgctatttagatattttctaaatcttttggccttatctttcattcttctaatagtgccattaaagaggtcattttaattttagtaaaccttaatttggtaagtttttctcttaggttaaatttattcttcaagctgtttactaatcttcttatacctttggttaaaaagtcctaactaaagaatatagcatcttaagtcttaacaaacttttattcatgtaaattaaatctgaattttcagttttttatgtgactttttaagtggacaaatgggtttctttgtatgttgctacagtttaggaaaatataaaatttcggttttaattcaaagttctagaaattgagtacatacattttgctgtctatatttaaagagcttgaaaataatttaaaagttttacaaaaaaaccaataaatatgttgtagcatacatgtttctcattccaagagttagtgatactgtatgcacacacatgtattacacatgtatacaatacaggaggagagggttttcttagtaaacacagtaaatgcttttgtggttttcttttccatgtatcaaaaattttactcatagacatgtcattgtgaaagaaatctaaagagaatatagtgaacacttgtggaatcatcagattttttaaaatacagtgaaatttattcattagttttatagtcctaaaataagcacatttatgtgaatatatgtgtgagtgtgtttcttacagtgtacattttatgacataactgactttaaattaagctcaatgaatgtacttgaacagtaactaactatgctttaaaaatagttacatattaagttatatgaaaaaagggaaaatactatttgatacagaataatttttattgaggattacatgtggcgaaaatcttccatgtatcatattttaactttatagtttaggtaaatagctaggcagggattttgctttctgtctaaaaataaccaccaatcataaagatgttggtttccataggtcccatacttttatggcttgcctttggacctacacctggatatcctttgtcctgtgtcatgagatcactgctactgaagcaatactatataatacaatagtgcttgactccttacttctatcttggctaaacagatgtaaatttttgcctctgttttagtcaatggaaatatttataacaggttttcgaaacttcttttctgaaaactgagcttttagcattgttaatatcatttcaccaaagcaaaaaaaaaacaaacaaacaaacaaacaaaaacaggtttgcattttgttacacagtaaacgcacaaagggggctggctgcagagcacaggaaatgtccagaatagagtatcaaatgctatttttcttaaaagcataagttactgtgaactgttaatgataatctaaataagagaagtaaaacagactaatagacttaattattgattgacttaaatctttacggatatgtttgttctgtttttagtggcttttcatggcctcccactgaaaatcaagaaagaaccccacagcccatgttcagaactcgggtctgcttgcagtcaagagcagccctttaaattcagctatggagaaaagtgcctgtacaatgtcaggtaagaagccttgtgctcgtagagagcagcatcccttttggaaacagaaagtgtagaatgataataaaatctcaagtcaatgttatgggttacatcttcattacataataagctaattaggtaatgtattcagcagaactctaaagacccatttgccatacaatcacacactttagaatcgttttaaagtaataattctcatctcaaccatcagttgcttttccactgtggtgatgcatcttgagtttgaaaagagggtcttgcttggcacaagcagcttttgaaggttcccatcagaacgaatgcattatgtactttagatagtttgtagaaaaaaatataacatttggcaagcaaaggcagtacattagttatctgacaggctttacagatgatctataaggtgcattcatggacaattgcaataaaactataattttataaggcctagccaaggctattatctattaaaaagccggttgttcttgagatgataataaagggtggtgcattcaaagtgcattgttcatttgctagaaaatttgataacacatatgttcattaaaaaccctttgtagtgaattgcatgctttttacttttcatcttggcctctaattgcattaaaaaaaatagagctggctatagctgttgactattattcttgattacagtagagacttagttcttaaagggaggtggcttgagaacttagaaaaatgattccaaatctttgtgctgtttcataaggtatatcaattcaggcacaatgtgttaggatccggaagaatcttgtgttactgcaaatatacctgcttatgccatcttttacgtctgttagatggaagagtcaaaaaaattagattgtgccatctcgtggcaactgaccaatgctgagatcctttgttcctgtttgctcttgaaatttattgtttcatatgtgactttctaagaggctcactaaagcctaaaattgggaggtagctcatttgagactaaatatattctctaaaacagatctattatacaagtaaactatgagagcaaaccgagttcgtgttagatactaccatgcatttggctatttcattttgttgtttgcattttctcattaaggtgtgtataacaacacaattattttaacattggacaatttccagtcattgaaccagttattatggtgaccataaaaatactgttttatacaatatatctcagacctataaactaacagttgaggaattggccaacaatttgaaggattttgtttataaaaacaaaaacaaaaacaaaacaacaaaaaaatctaagacaccatctctctcagcatatatggtatatataatacatcctggagtttccatatctctataaataataaaatttaatataacaccttacaggggaagaagtaatattttaggatgagtaggcatttttctatctcttttctttcttcctttcttcctttcttccttcctttctttcttccttccttccttccttccttccttccttccttcctttccttctttctttcttccttccttcctttctttctttctttctttctttctttctttctttctttctttctttctttctttctttttttcttgttgtttgtttgtttgtttgagacagggtttcttcatgtaactctggccatcctggaactcactctgtagagcaggctgacctggaactcacagggatccacttgtctctgcctccagagtgcttaagggcatgagccacctcacctaactttgtttcttcttttttatgcgaaagactcaagcaagccaattcataaaaatagtaggtctttttttttttttttttttttttttttttttttagaaacatcagtaaagaacataggtaaaaccaaacacaagacatttttgttttcggcttaagaatttcattcatatgtatgatgcactttaattaaatcttttcccatatttgctcccttctacagttcctcttttctcctccaccaatttccttcccagtgtattttatatgggaacagatagctttaaagatggagtagattactacgtatcacatacccctgcacttctggaaagcatatttaagcgtggatataattctgttgaagtaatagagaaactataagttattttacattaatctgcaaaggaaatatttcttttaaaagtctatcacttttgtatatacacttatgtatatatatacatgcatacttacctacatatatactttgttttgagatcggatctgactagtcagtataggctggggcatagaactcagtctgtagccaaggttgactcacagagatttgcctgcctctgttgcaattaaagtcttgcacgaacttaagcagctcttactaatatttttaaaagagtgtacctagatacctttttgttgttcagaaaataaaatctgattttagtaaggtattttccttgttaaagacattagatatttcaaaaagccacacactggaaagcaattcaaagttatagtataaaacaaacagcttactgtttttgcatttgtaattgagagtggaagttagtctatgataataggattttattcttaatattattttgcactcacaatcaaagaaagcttaactatatcagagacactttaattctcctcattaatctttattatcaaggaattcaaggccaaacatcatttaatataaaagatctagaaaagcaagagcactgcctcgaattctaccacacataaaggcaaatcaaatatggtctttcttactaagctgacattaggtcttgctttgaaatgtaatagagagtaagaatgatactcaggtatttaatgatttaggaaagagctatttctgaaaggtgggtgttcacaatagacagaggttaatggcaatccctcagcacacagggcctccttaactaagttgtctactgaaaatgtatgttacaaatagtcattatccaacttcatatgatatttttctatgtcagagcatgggggctttgaagtttagagattctcttattaaaaaaaaaaatcaaaatccaaaggagtttagctcccttatcacttatgtctaaggtgagtttagttattttcctaggatcgggatctttaaaaattactccaatgcaacctatgctctcgtttgttctctgggcagtgcctatgatcagaagccacaagtgggaatgaggccctccaatcccccgacaccatccagcactccagtgtccccactacaccatgcatctccaaacacagctcatactccgaaacctgaccgggccttcccagctcacctccctccttctcagtccataccagacagcacctaccccatggaccacaggtaagctgcagacaccctttcagatgaaaaagtaaaaatctccaccagtttcagctttcatggaggacgttacccacaactgttctgaagatctctagtgttttaaggtgagcatattaattcggcacatttgtacaaaatattctcagtaaaaggttgctctatcaataataaaaataatttacggagaagataatttgcaaatagtacttttgtaaaggtttaaattgtttgctaaaatgaaattaatctgaacatttctccttcacttctcattaattgcttcacttaaacgttacaacagagcatgcatgtgtacgagtacactagttttgcaaagttcgtagactccttttattaggtaacctacaaaattagggtcattaccttacattgaatggcttagttatacatagtcttacagagtataacttacttgattaatctgtttgctttccttgcaaatgactatttaatgtccataaacccatgactatggactctaaaaaagtgcttcagagatacagttgccaaatgagtgttacttagaaatgaacaaggcaagaagtgagagccatgtaattggagactgttgactgagacaagtttcaatgccattcgggaagaagtacttctttaatccatgagctagaacacaggcttactctattcagctaaattcatctcttctgtttggttcgccattaccagtgctgtccaggaaactctttaacaatagtctccatgggagaaaaagactttatcagaagtgtggacagagatgatggcaaaatactgcctcttgtgtaactatctttgtgatagccctgaatactaagtagaaagaaacatgcaccacacaccactatgtagtatctgtagcctgcattagatgcttccaagagcagaagtaggaatgacatcattaggaaattcacagcttagagtttctattgtctttctgtttaaaatctgccttttaattgaaaagttatacagttacactcaatataaaattacattaaccattggatcccccaaatttcaaaagttcatccaggaacgacaaccagaactggctgagatacatcactgtaaaaatagctgatttgaaaggactcctcgcagtcatcggaggaagcaggtgtaccgcaggcaaatctggatatataaagaaacactttatacctcagtctcaaattgagttactccttgctataaaggaatagcatgaaatctaatttccccatgtgaaacaaaaccatgtcctctccctttggcacccgtcacccagttctcctgagctgtagttcctaaacgcctcctaatgtctttgctttctcactccacaaactagagatgtatttagagtgaaatgctatgtgcatctctctgcaagcagttttgtaaatacagatgagaggatgcccgttgcagggtaggccattaaacaggagcacattttgcagggccagagaactagcaggggtgacaaaccactgcttttgtcttcttccgaagacgcacccgaatttattgtcaccagtgccctgcatttcgaatgagcactgaattataggttacgtcgtctgccctctgtgtaggcaggctatccctaaggcaaggtgactgctgagtaggtagtgcgcttgtttttagatgacctaactggaggtgctttggccagatcaatttttgtctctcaacttgaagtcaaacagttgagactaacgacagccggcccggaactacaagagggaagctcggggtcttttcccactgccccccaactgagttttgagcatggcaccagctggccaatcccaggaaaatctccgaagccttatgtttctgaggaggatttcttagagggctctggccaacaaatggcagtcccttggttataaatggcaaatttgctctgggaacagatcccttccccagatagctccctccagcccaggcaccccacctcactctgggaacagtttacagccagctggcctgcattctgcttcctctccttagcctcagcgcacacctcagaccagccctttggcacgtcttcgtgaacccactgtgcaagagaccggtctattttcttcagccgtgctcccagttcatataccgactctcctaccccaccagtccacctccctacggtcatacagcctccacactttttcctcattttctctttgaccaatggtcaatggctcaccaaatgacacccaagccatacattctcccgggattcatgtccctgatacatacatggcctctcacaagaacaagtacaaatcacattgacttgtaaaaagcaaatagctttgcttccttacaatgcttccagtgcgagcgatattagcttccttttaaggcttcagaaaggagccagcttcttattttatctccaagttaccattttctgattcactccttgacagttcttaatgataatttctgtttctttttttggctaatgaaataagcaagagaagggaaatgcatgcagtgccagccagccccgctgtgggtttcacaatatctgggcttctaagtttattttgtgcaggtgtaagcggaatttccatgtttctcatggtagccggtatacctagagttaagccctggcagggagtatgcttccgaatgctaaagcaattgctctgccattctttgggttttgccttattttcatttaacattactgaaattaaatgctaactttcaaaattaaagtctccgggacgcttttagtggggagggttaataggctaatatttgctcatggatatgttttagaggttattttttaagcactcctggggcatttttagagtccttttaaatctttaatcagtccacatctttgtggtgggtcaatgatattatggatgagatgtacagaacagaacaattatgtgttcagccaatctttaccaagaaggaaggagcatgggactcaactgcagctctctgcctaggccttagaacttcctcatgccctcaacagcccggcttacccgaaacctgcatgtcttgggtggccagctgtgtatgggtgcttatttttcaatcagctccacagtttggaggtcataggatccagaatgtgctataatgttgtttgacaggacagatagagactttttaaaacaaaagagccatcataatgccaagatttatttcttacaagaacacattgttaatttggacattgctgaagaatttaaaggcctgctgatttgcgaagagattcagttctcctgtgcttcctgaatttctgagggttaagaaaggcaagccaataagtaggtttttgtttggaggttcttttgtttgggtgttgattagtttggtgacagaatttaaagagagagaatgccattggaaatctccttctgcccccgcccttttttttcttacctttcattatttgagaaccctttcttctagaagttatgtaaatgatccaattagcttaaaattggtcattttagctgtcagagttcatattgattccaaacagttggttgttctccagctactggcagtacacctttaattgcatgatacgctgaattgtttgcaatggatgggttaaaaggggagtacacgtcatcatgtgatttaaaacaaatcatagcactactcttctaagaaagagaaatctgaggctcactaaagctattgacattgagacgtttaaagtgcacactagcagctaggaattatgtaagtcctttaaagacaactttgtgttaccatttcatctgaaacacgctctcttctccagatttcgccgccagctttctgaaccctgtaattcttttcctcctttgccgacaatgccaagggaagggcgtcctatgtaccaacgccagatgtctgagccaaacatccccttcccaccacaaggctttaagcaggagtaccacgacccagtctatgaacataccaccatggttggcggtgcagccagccaaagcttcccccctcctttgatgatcaaacaggaacccagagattttgcatatgactcaggtatgcccatcctcttatggaattacatgtaaatcatcttttcacctcccttgttgatttgattatggttgttagactgggtgccatctaaccattaatttctaagtagctattctgattttatcctgtatttgggactttctacagttgagggcatgggttatccgaagaatttgccatgagatgatgttcaaaaaaaaaagtgtctgaaaatgaaacgacttcaaagacagtacaatttatagaattgcacttactcaactaagagcagaaacttataatttttttttgaactttttcttttttcttttgtatactgctatgttaatgctatttagaaataatattggcaaagaaatggtcttttatggtatgtatttacacttggtaacttgacacaattcttggtgtcaagaattccagtggtcctaacgtaagagttcttacatattagaagaggaacaggaaaaaaaaaaaagcagagttaagattccttcgctgaattacgttttgtctcagagagctggaaaatctactccatatcatctgtcagaggaaagaggtcttcctgaacgtacagaagcttaaaattgattccaaatgttactaccaagttttgccaacatttaattttgaaactgaaaaccttacctaccttgtctctattgagtttttctgtgaaattgggacataagttttttacacttctaggtattttctaagatgtgtgaagtaatgggtaatgtttgtgaggagggcaccacccacctgtaaagttttattactaacattgtagccaggtccatagctggtttttgatgtggagatacttgagagtggtccaatttccttccatctggatgcaagtgaacggacatcctttatgaaagacctattgtaataactgctgagttctgcttaggggacaggaagctgcttccaggttttattgaataaaacaatctgttttattgtgaaggtctcttagagttcagcacaggggtccctgggatttaaaggctctccctcagtcgccatccttacaggataggaagggaaaggactgagggcgttggtgactctaaagcatgcttcaaaaagcacaaaaacagagtaatttctcagcagccctgaatttcctgtccaactgacgttgttcctgggcttggggtagattctgctcaggcatggtttcttgagggcagaacatctgtttgtgcctccagccaggtctagagggaaaaggcagacgcaatgatccttaagtttgtatgttaggccttgctaagtctgggggaacattgggccaagggctaggaaaacaggtaagcctgtctctgcagaaacactggttctaaccatttctagggttaattttaagaggttttgttaaaagctaaatttgagctggacttctgtgttgtttgtaaaatatgttctcaaagaatcaaaaacaaaaaacaaaaaacaaaaaaaacccaaatatcttttttttacaccctcccccccaaatatctattttttagatcctttgcagtttagaaaactaactgaggttgtgcaccttgggaacttccttaaaattcttcttagtgatgtgagtttagagccttttaatatctgcccttgggtttccataactaagtgtcttgaaagccaatgcttggttccactggtaggtaaaaaacacatttcagtgtgaattccaaatcctgttaactgctgtcctgcttatctctagctattgttagtttgccacagtaaagtttaattagctaatcaacaatttaaagaagccacaggtggaaattatctaagtataaatagtcaatcaatgggatttgtataatatgttgcaatttttctattttgctgttgttaaacatataatactggaggagtaacattgaatctttttgtgattctctaatttatcccacatgtatcttctcatgtgcatatcgcaagcacctgtatgtgtagcgtggaattaagcatttatattttgtgagccaagcaggaagagatttaaggaatccaatcaggcaaacatttaagggctgggtttgtaagaggtaactgaatctcttatgggtcaaacacagtgtggatgttagagtcagccactgtgtgtgtgcgcctcaaaagctcaccttttgccacctttttaaggtaagcatccagcatgctatcttaaaagtgtgccttctctctttgaagtgtatcacgtgtcttcaactggcttgtaaaatactacttgacatttgagagagattgattttatgctatgccctccataattgtattttaaaacggcaaagttatataatacttttaaattctaatctcaattttggctatagaattcagctgtatttgaatagttaaacggcaaaggttgcacttctgggtgtgatttataaggaagagctttgtgatatgatttagaagagaatcattcattaatctgtggatgtcaaaatacattttgccgctatgcaattggtcctttgtatgtatcacatactatgaccaacaaggatgatctctgggtattttgtttgtcattagctcattcatctttcctgagagcacattaaataaccttttaggaactctaatgtatttatcattgaattaccactctctttttcttattgattttgaacctttaagacatactttatgtgcgatttttaaacaatattttttaaaatgtgttttctgtgtgagttgatctagaatctgtgatctaaagttatcgcttcagagggattctgggatactttattgcttaattcaatgtactataaatgttgtgacaataaaagatgtcttcaaagagaaaagacagcatgattgtgctctaataaaacctgacattaattatgacatgggaaatggtaggtctattagttataattataattacaggaacgcaattttaactgccgaatatttaagataaaaaattcaaaatattatgttattagagtagaaatctttattcaaggaaggaaagatgggggggggggagttgggtcagagggagaagagaaaagaactagatattcaagaagctaatttattaggccatacagtgtggaatagttacatcatggcaccatggtggaaagttaaggcagtacgtctactctgttgatttgtttctcttcattagacagatagtgctgtgtgaagcaccacacaggtttttagttgttgattagttgccttctaaattaaatgtatatacagcactctttggacaagaaaccatacagggtcaggatgtgtggaatgcttcatgtggaatgtataacagagatcctctgtgcagccttctacttccaaaaacgtgtttgtccattgttctaactgtctatgtcagcttagaatgtcagtgaggtagggagctactattcatcttaactttctgcctttgagaccgtcttgctatgtaaaccacagttggcctgggtctcacagtattgaccaaggtagccttgaatttgtcacaagtcgtcctcctcaacctctgcagaactatctatctatctatctatctatctatctatctatctatctacctatctatctatcataatatctatctacctccataagcttattgctaagttcatggtttttcattgtatttgttcagaacaaaatggagtgtgttacagatttttgcattttaaatgagggaaatatttaccttaatctggatgaagggcttctatatggctgaaggctctctgagatccacggggatctgacaagcacctcgtgttttcagatttagaggctatgtttccctagtttaggaaatcacacgggccaggggtcaaactctacttacgttttagatgctcactgcttgaaggtagcaaattataagacctcaaatcccgtaaaaggttaagttttaagattaagttttactgtcttatcttttctcttactttttttttctaacaaatttattgccaattttctttttcccttttgagatggggcctcactatacagtcctacctcgtttgggcttcactacatgaatttgatgaattcacagatatgtgcctccagaatgctgggattaaaggcaagtgtcaccttgcctagcatctcaaacatctttaagaattaagaatatcagggctagaaagatgggttgtctgttgagagtgcccattgctcctgcaaaggatgtggatttgcttcctagcctctatactacagttcacaattgcccgtaactccagttctagggtatccaaagttgttttctgacctccattgacatcagatacacagatggtgaacatacatatgtgtacgcaaattctcatacacataaaataaaaacaaataaatcttgaaaaaaaaacaccatgagtttatcaaaatttaccacctctttgtaaagtgcttctgtcaaaggctcaataataattagaagaaagacaagcaaatgaatagcccactagctacaagtcctttgtatgcaacttgattttgtctgagccctcttaccagacttcagtctttcattttaatatcctggtatgcagtacctacagttgatctggaacagaagacttgagacttctgtcagctgtgttcattttcatacgagccaacttgtgatgtcctgcagtgtctgaaacagatgtcaggaagcccttggaggactagcatgtccctcttttgattcactgtaaacccatccattcttcacctcagcaacttctctcatgtcccccaaatatggttatatcaactcgttttctgtcattagctagtaaaaatgtgacctgtaggcagagaagtgggaaaataattgaagtatatgtctagtattctcatgggccttggctgacacttcaacaaagagttctgaatcctcttcacgttcagaaatggggctaggagagggtgcttatgtcctgagtactgttctgtgttttgttgtgttggtgacttgtcatcctaaacatttagatggacagcagtgaagtgcaccttaactctgtgagcatagcttgggcttcttgaaggatttagagcatgattttaaattgaagcttatatggtcaaaaaataaacaaacaaacaaacaaaaaccatagggtaaggcactaagaacagtgtggctatttgtgtcttaatagactccgggtggcctttatgtgtttggagataatttgtcagcaacctaatccattgactaaacttgtaaaacactaaagaaaaaaataataaaattaagaaggttagaactacacttagtgtgtcttcagagtatgaataccctcattgttactttgccctttaagaatatcccagaactctgtcatcagtgacagcaagcctaacacaaacagctggagaggagggagaatttattttggatcaggctttcagagatgtcagtccatagtccttggcagtgttgattcttggtgtagggtgaaagaagacatcactggagtgggaatgtgtaagagaggctaggctgctcatggcccgcaatctccacaaagagatgggaagggggtggctggagaccagatataatcttcaaagtttctcctgggagactgagatgtaacggagacttcctccaattcctactttctaccaccttccaaatagcactcacacagcaggagaccaattctttattactggagcccattagggcaccatgtgtgctccaaccataacatacacacttttgcttacagaaagagaagtatgtacttatattattggaaattcagcgatttcttttttactgaagaaactatttttagtcattttttaagaatcaaatcagaattggaatttttttagagagttcggtgaccaaacagacacggtgtgtttttgtgccatgagagtcaatgcatcctttctaatgtacaccttccctgaccagctacacaattatcgctgttcatttcctatagaatgcaacacctaaaataggaagaggcacaatatctagaactttttatctctttaaaaatattagggaggttccttcacgaatgatgaaaatatacttctcaacacatttagaaagaaaatataaggaaaaaacgtggttaatacgcttaatttatagagcagtataccttaatagcaacacagtgttatagcttgcatatctttgtgctcatgtgactgacaaggaaatgaagttcatcacagccactggccagcatcacagaacccaaccttttatctccaaccctgaacgtgagcccaattcagaatgtgaattatagctcctaccgagagcataatgctcttgtgccacatgaagttaaagttaggaggttgttcacatttcagtttaagtactggagccaaatcacaaatcaacttggatatattttaatatcaatctcccaatagttgttaggctatattccataaactgctttaattgtgttttaaatgtattgactcatggaggttatgctgtacattaaattcttaaaaatatgaaataatgttgggtctggtggcacagtacctagaggcaaaggcaagcagaagacagtttgaggccagctggatctacaaagagagcctcgggccaacagggttacagagtgagaacatgtctttaaaacaaacaaacaaaatcccaacttaaaacagacttaaaatgatgcatacttattcattaataatgtcccataccgagggttatcttcatcccatgtagcttcttcaattataatcttgagcctctaagataagactgcagtcttgttttctatcactggtttgcctgatatcagagactgttagttaaatactgaactgtcttaatgctatagtaagaacgaatttaacacagactgtcctgcttcgggctgcctctgccctctccagtcctgacaaggcttccctagtgatttactccggtgtgaacacagggcctgtggattacaaatacgttcctatgcaggttcaagtaaccaagagacagacttgctttctttcctcgtccagatggctggcaatacacacgtcgcactgcttaggttagaactgggccttttcaattcatcctcgagattgcttagagtagatcattttggacatttctatttttggtcatttccagtgcaactctgattatggttctagaaactctggctttgtgtacctgagatgtgacactcccgaaggctcagctctgctctctataaagcatctttactcaaggccacattcctttcagcttaacttcgctctttcctaactttttttttcttcccaaattctttttcttttttaattaggtattttcctcatttacattttcagtgctatcccaaaggtcccccatacccaactccccaatcccctacccacccactccccctttttggccctggcgttcccctgtactggggcatataaagtttgcaagtccaatgggcctctctttgcagtgatggccgactaggccatcttttgatacatatgcagctaaagacaagagctcccgggtactggttagttcataatgttgttccacctatagggttgcagttccctttagctccttgggtaatttctctagctcctccattaggggccgtgtgacccatccaatagctgactgtgatcatccacttctgtgtttgctaggccccggcatagtctcacaagagagagctataactgggtcctttcagggaaatcttgctagtgtatgcaatggtgtcagcatttggaagctgattatgggatggatccctgcatatggcaatcactagatggtccatcctttcgtcacagctccaaattttgtctctgtaactccttcctttcctaacttttaatattgttgctgaaagaaatggacttggggatgttaaagaaggaactattgtttttttttgttttttgtttttttgttttttttttttttttttggaagatgttaactttctatttgttgctctagcctacaatgatagttttcttttactcaacctggggtttgtcgacaagtaggcggatgtttcaggtgcttccattgtgaaaagtgacagtggtctttacctaattgatcttattattataatagttgtcacggattagcctcacagtttgacttagcttctaatggcccaatgtgggttgtgtggctttttctcatttgattctggttaaagtagtaactctccccaaccatgatcctggtctgtgctctcagtttttctaagaaatgcttcaatatactctaaatctacagttactgtaagtggccttggcgagtgatttgatttgagaattgagactacagtctggatttactcttcatgcattaacacaggtcaaatggacagggactgcattttaagtcagtaatggaaggctgaaggctgtcttaaaccaatcatatcagttttacccatgactgattgatccctaggggcagagccttgtaagcgtttcttttccatgaatggactccatagagcctggagtttcattcataaaatggagactgaaaggaaacacacacacacacacacatgcacaaagcctgactctctggaatgtcatttataaagagctggagggtgtagtgttccatcagctgttgcttttgccagttgactggaagtaatgattaatgttcattggtcctgcttgtgtgtaacctgacaccatttatggctttccagagttcctaatgtatggtgaatgggaagacaacattctcaaatcagaaacataaacaggaactggtgggtctgaattccattcaaatatgtcatctcagccccactgtgtttgtctaacttggattttgcaggcaggaaagggggaagggagggatgacatgctccttagctgggctagtttagaaaggggaacttgacagggtggagtacacttttgtagtgtgtaatttatgctttcttttcaaacagaacaaccaggacacttaggctttgcgttgcttacgaccagtggctgaaatgaacatcaactgtttttataagtggagctgagatttgaaatgaaatgaaacagtttaaagaccactgggtttgaatgtatgtgtttagtgaatgtgaacaaaagagccaaaagattaccttcttttcaaaacggtgtgtgtgtgtgtgtgtgtgtgtgtgtaaaatgaccacacctgtgcattcctgtgtctgtgtgcactcatttgagtgtaggcttttggattttaaatattcttatgaaatgttttggagctcaattatttccatactcaatgatttagctaggtaagtggtggaatgggtttcataacttgaaataagttttttttaaaaattgtattgggttaaagagatacttattgttttcattgtgtttttatttattgctgttaatagttgttggtaactttcttaaggacagataatccaaatgaatgggaaaatactcaaaaaagccaaataaagttgtcaaatgagcagtgctagggttgtgattatttaatagatctctaactttgattttaactcctctttctgtgtgagccttaagagcttattgctgtattactgtgatctgctttttagttatgttcagcattaattgtaaaatcactcagttcgtgtgacatttgaaaacaccaactcctgggcctgatatctgttgaccatttgtatcatatggagcaagctttgcgatttcttttgcctcccaatttacttatttccaaaggggccttagtgtatttgtagagatgaaatattgtcatgtttaagcagtgcctaacacagtatccagcatagattagcagacctggcaccgatgaaggatactcagtgggatgatttttatcatgatttctgtagatttcttcaaagtccttcaacaaagtgccataaactcatacctcaggttagaggataacatgaagtgtaagagatattctactaaagccatcatatatgaatccagtatgctgtgtctgacctagttcaagctaaaatctgttacttgttccatttttattagaagcaagcagaacaaattatcccaatatggtaggaatcccaggaaagatgaaaccaagaggaaagactctacctcccatactctcctttcaaatcatccagcgtccaatgggaaacaaatcaggaccaactgggtactcagtatcaaattcttcactgcagactgttgttgtgaatccttgagtcagtcaatggccttggttctcatatttacttttaactgccatactatgtgttaactgccacactatggcattattgagtaaataccccaaatcacaatgctgctcctgtcttctgatactttaaccttatttttgactagcttaatgaaatcacaaccctgtaaaacttacaaaatcctgggtttagaatgttcataaactgtttagacctgcttatgttttgtatgtgatactatccaaaaatagcccagaagcttatgagaaatatttgtagtttcatagggaaagtcatatgccactgtgtgccactacgctgccattgtgtctcagaaacattgaattctcttcattgcaatactccttcttctatccttggtttttccaagagtatggtggttaggaatgttcatacttccctgcctcattttagagaagagtctgtcagtgttgacttagcttatttgccttcatagtttgctgaaataaagttatcctaagcatgaatgaagcaatactgaacttatcacttccttcttaaaacttaagccatatctttcttttcttccagtactttcttttgtaagatgcatttattttattttatgtttatgagtgttttactttcataaatgcctgtgtaccacgtgtctgccttatagacagggaggtcaagaaaggggattggataccctgacaatggaattacggatagttgtgagccaccaagtgcatgctgagaatagaacttaagttctctgcatgaataaaataatttgcaaaaccacagcctttgagacagctctccagcccttctgccacctctttagactatcctgcttagacctttgagactgaaaaccaggaggtccataaaacttcagtcttcagttccttgtttgtcttctttctcatgcaagtctagacatactactgctggaacttattttagacttaataacttgcagatttcttcaatatagaatacattattggtgcaaaaacatctttttcatgactatgacttttaggaaactataacatgtagttttcttgactaactatatcaagttcattcatgcactgaatgtaaaagcagagttaaagggtagcgtgagtgtttctgtatttgtattgtatttatcattatgaagcttgtgttatttatgccctggacatcctttgttttttttttcaacctaatatgtgatatgaatagaaatttggaagaaagaagcccaaaccagggaagtatcagttaaagaactgaaggagatgaaaacattgaagaataaggttttaattggtatcataagttgttaatatagctcatgtcatgatatttttctctttagtgcttggacttgaaccaaatacttcctgcatgccaggcaagcactctactatgtatctatatgtatctatcatatagatcctcagctacctcaggacttaatacagatattttcagaaatttgttgattaataatactaacaaagaatggttaaatcttccaggtttgcattgatgaggacagacacacacacacacacatacacacacacacacacacacacacacacacacactcacacacaaacacatcttacaaagtatataatacttcaaatgcacagaatacatcattttggccctgtatatttatcattttaaaatttctcccactatgcatgtgaccccaggactaggcagggtcagttaagaggacagaatgtgaccctattttaaaagtgaatgaaccaatagttccatgccaccttcacttagtcatttcacccctacaaggagttaaaatgtacagtcaggcaatttttgcatcctaatttaaatgaaagcaaaggcacactcttgcgctactcctcctttagtgggatatgtcttttaccttaagacattggaaagcttaattacgttgtgcattgactattactgcaggagtctaagcaggagcatcaaatgaaggaaactgcttttcctacccccttgttcagtttgccttatgaactaatcctgcttttactcactatttgaaagcaaagcagtttcagccaccactaaaactgccctagatgagcatgacaaatctttcctgtctgagcctggtgtaccttttggaggcttagacaaatgatagccaaaggggaattttcattttgtacaactgagcatcaactatgcaaatcaaaggagtgcctggcatatgacatgtgcaaattcagagctgtacttcgtggtcaaacctttgctaaagctgcccagatccaaactgtattttccagttcagcttttacattgttagacaaagagggagaagcagctcttttcaaagtttctcgcacatgtatcttgagatggtatcacttcaggtatgatacctttagtagtgattcttcatgaagcctaacccaacagtgcagttcggagagttagcattctttgttcttgactccacccatacgtcatccaagcctggagttgccagcaccactgtgctgctttgaatttttacagcatattaggtcagctttcatcaccacaagagctcatctgtaacaaattacagacgttgtgatttctgtgagctgatttggtcaacactaatatcgtgttttagaatgctttgatccacaagtttcttacagcactaaaaatcctttgtcctaaattcaatttatataatccaatttatagactgatttttaaactttatagaccagtgttatttaagaacaaacgacaagggttaatattggggaaaaaatgaatttcaaagagagatccttgagtatttaaaatgtctgatggaaactctagcttaatcacaaatttgtgatgactgttcaatcgatgtatttttagataccatagattaagagataaatttacagagactattccagagtaacttcactagtaaccagcaaatcaactagtgaatcatgagacttaagaacagggaattaagatattaaaatatgtatttatatcctaaattcttactgtctgtgtatgcttagatgaagtatcacttcatatcaagatacatgtacagtacaggaaactaaaaagagctgctttctccctttgcctaacaatacaaagctctgctggaaaacacagtactgacctgggcagctttaccaaaggggcaatattacatacaacttactccatatgctcctcttaaaaaccctttgaaaagtctcagtagcactcccattttacagaggagaaggttgaagaaagagctgttaaccaacctacacaaagctacactcccacaaaatgagagacctcatacttgaatgtgcacctagtaggtgacattgtggtcattggcaatcactgggttgcgctggtcatcctataattataaccagaggttaccagagaagatgatattaatgtctcgccatcctagcatgtttccagaggagattctacagttgactgttactcttgcattgtactttcttccacaagtaaagtggaaggctctgcacagcgacacttgcatccctgtcacccattgtctacctttgaagtcaccacttagccagtttggttcttagtggaacgtttagcaaaagttcaaatgtaatgccaaatcgcaccagttgtacttttttttttttattattagataaggtagaaatgaaagcagcaggcaatttaattagcagtaatttttctgggcgagtcattactttgatgaacttcagagcaatgtttacggcccctaattaaccatgttagtcatttgattgaataatcactttggaaatgtttctacaatttgattagagtctgacccactctgatagtcataaattaactgttatcactttagaataacatgactttagttattctatgtgaataaacctcctagccctgtcctttatttaaaaaggaaaaaaaaaaaaaaaaccaatctggcttctctggactatataaatggcattcattttaagggcagagtagatttcaaaatgctagccaaggtcttgcctttaaaatattagttgttaattttatttgctctcatgtagtaaatggtaagaattggaaaagcacacttttctccataaattgccactcatatccttgtaaaaatgtaaatcacacgttgttctttggagaactgtaatgaagatcctggcctcagccctattatgtgttactgattttgaaataaatttagattttagagatacctatttaaaacatggagatgaagagctacagttctcgaagaacatcacagtgggagagaagcaacagagggagcaactgctttctagacgcaggattagactagctgtgcatagagtatcttcgacgctcttgtttggttttcccagagtacggtaattttacaccatgttagaacattctctgggtatccttccgccttgaattctgggttcctcggaaatgtttgagtgttctcctagcccccccttttttcccctcgggatggaaagtgtatctttagccacaccaacatggaatagacttcagcctctgtcttttcctctagcttcctccagagctgccagctgttttttacagccgtaccccaggtgtgtagccgtcagagaatttttgtggagtggtggcatcagtatagtgaaaggcttgcctctgagcagctgttgcactgcctgcaatcattaacactgtcccttcccaggcccagctgttttgagggacctttcgcctggcaatagatcagaataacattaaaaattaatgtgaagcttggtcattagtttgaagttggggtaaagtggcttgctaactattcggccaattatcaatactaccaggaagagaggcactttaccttcatagagtcagaattatgttctatgtaataaattatatggaccacgttatagaaaaatgtgtgtgtgtttaagtttcacactatcttcatcatgtaacctacgatttattatgtactttcattttatgtatttaattttttttttgatgctggagattgtacctagggactcgtgcatggtgtgcaaagggttctactacagagctacctgcccagcctcttactgcctcggctctaattggttttcttgcttttgtttctgaaacggagtctctgtgtaattcagactggcctcaacttcacaatctttcttccttagcctcctgaatactaggattataggtggttactaccaaatccatactttttaaaatgttagaagtgtggctgactggaaagatcttttagattaaacccatatgggttaaaatatttttatggtaaaaattgctcatatttttgttgacattagtacaaaaaattattatttgtcaccagactcctccctaaaaaatactgacattgaaaatgaaaaattctagaccaaggggaaaaccaagccaaataatagatactgattacccattgttacaaggagtgtgtagataaataggtctgaagagacaagggtttttaaattcaatccttaagaatggtgtattttaattacagagtgggaaagtgggagtatttttcattaaatagtacatttatggcacacctttagtttttttttaatgttgctaaaaaaatttactaaaacatacagatgatctaattggcttgatcttaaacattaatgcattcaagaatagggaacctgaaactttctgttttgaagaattagttttaaggaaagtgctctaaaatgaagtactaaaaactagggattggagctcagaagaagagacttctaaaatatggggagggctttctattgggggctgccatacatctgcttctggtttcagaatgaatctcttcatttcactaggaactagagagctgtagtagatgccagggaccatctctcaaccctttattctatagcaatccaagtaaagaaaggtttgtggaaatttatgcagtttgtaaggacttgatgtttgatccattgtctcctgctctgtgtttatttcattttcctgtgtcaaaagcattgagcatggtcagttctgagtcagcacctgagccaggcccacagttagccctttgctttctcttccagaattcttggccttgtaggagagtctttcctgggacaggcattgtgaaactgcttattatgtactgtcctttcataggctttgaacatgatctatactcttaataaaaatgaaaggccagacatgctattatctgaggaaaacagttcaaaattatcaagataatttatgaggtttaattattctgtcttttcttagtaatttctgtctagtattcatgaagtcacccatgtctgaaccatttagcactgggcatagagaaaatactgagagatatataaattcattccacttgcccttaaacatgctagtgtgccatccatatggtattgctgaacttcagcaaaggtgagttggtaaaaccgtgttgacttgcttattgaagagatttagcctctcctatgatccatttagctttacgtacttggaggccccactgaaaatgttttccacattctgacagacttgatcattggtgctcttgatatttctgtgctgttctgtgtattttacctgctcttcctttctaatgtgcctttctatgacacattttgtttcctctttcagaagtgcctagctgccactccatttatatgaggcaagaaggcttcctggctcatccaagcagaacagaagttaagttcattttataagattgcttataaataacattaaaagtaatcagatattccaaatatgggtctacttactcattcattgtgtgccttgggaaaatgcaggtatgttcctaaaacatatataaaataatattgtttggggagatagaagatgagtaacagcagagtgcttgaccaatgtccccaaggccatgggcttagtccccagcaaggtgacataagcaagcacagaccctgctctatcgttggaagatgaaaagatagtgtttcccatcttagtggcttgtattttgctgtgagcatgagtcttgtccacacccatagctgtgttctgccagcaacttgcactctgtcaactagaaacagctccttccagattacccaccttatcgcactctaccgacaggcatcttggaaaatattgagctatggtcttataagcctaagtcatactttgaagtaaaacatggtagtgtgactttgcctttcactgtcctgaattttgtaccttttggaaaagcaattattaagaatgggttcacataagctgtgtagagacagaatttttattctaggtaaccacaatagaatactctgctctaatagactttgacatctgcaacctaagagacaagaaatgattatctggaaattatctctactgaaggattcctggaactatgtgcatgtttcttcaataaaattgccatagataataccttttcagttaggattagtattcatgattttatatgaatgatattaatagacatttactgatagcaaaagacagtacatctaaaatacttgagaggaaaagctttgcaccaatgcagtgtggttattcttgccgatgttattaatattataaacctaccatagagaaccttgctatggttgaattgtatgaaatttcttcctataagcaaaggtgacaattaggtgaataaaatatatgtgagagaaaaaaggcattattagaagatattaatttatttttactttttctatgaggtgagttatgttatagcacaaaacaaaacaataacatcctctctcttactctctagcctattaatgatgagatggagctgaggagatgacctcatgggtggatttgcttaacaccaagccttgcaaatttaattcaatccacaaattcacatggtggaaggagaaaccacaagctgccctccaaccttcagggccatgctgtgacttccatgaacacaaaacacatgcacacatccatgcacacgcatgagagcacacacccacccacatgtatacacactgtgtgcacacatacatgtgcatgctcgtgtatgtgtgtagacagtataataaaaaatatttcaaaatgataatgttagctttccaagatatttctgtaatgaagtaaacggtagactaaatgtgtttcagagtgcaagaacaagaccagaaattggctttggtgtccctctcttgaataatgaaacaaagaagaagccaggaaataaaatgatgcattattaagcataggtttgatgggatttttgtgaggtctctgcttagggtcagcagttatacatctctgacgtttatgtatcactgtgctatggcgcccctctaaattggagtgcatgaaaatcattctgtactcacactagctctaccactcttatacccacttgatagatggaggcaaagagccaaactaatgtctcaaatatcaaatggctagaaggagacggagtccgtttcaagacattgtgtgtgtgtgtgtgtgtgtgtgtgtgtgtgtgtgtgtcagtggtggctgaagaacctttgagcataatttcatattctcccattaatgatacatattgttttccttccacaggctgcatgtttgagaagggtcccaggcagttctatgatgacacctgtgtggtcccggagaagttcgatggtgggtttctctcgctttacactttgactttatgagcggagaccactctttccttttctgaaagcagttaacatttgtacttagggggttcttatacacaccatttgtcccaccctcagggctgtgcagtccttcctcctcccctgactgacctcttaggttccttttttggagacgggagagaagatcagcattgttgctgtgctctgtgctgagcagggcatctttccactgccctgcggagcacatgcagcttgttatttgagatttactgaaagccgatcctgtaattaacaaagcagaacagaaagcatgctactgtggatgcaccgatgactaatgcaggccctttctttttattgttcatgaaaagatgcattatggagcacaggaacgacataactgcccattgagtctactgattgcttgcccccacaccccaccaaggaagatgtacattactaatgtagcattatgttgtaattgcttaaaaggaacttaggaactcattaccttttaaatatctcttgctagtacaacgaataggtccccgatattagaaaacatcgtcaaactagatagagtattcttttcttgacaagcatagtggcaaaagctgacatttacaaggaagctttgggaaaaagtgaacagttaattcatttagtggttcttcggagtggtctccatagttcctgctttgattgtcaaacaggaaatgagcaggggccctctgattagctgattgcaaaaactttggggatctaggctgtaatgacttgggcgctctcagaggttttaattgtcattatttaaacagcaaagtgcatgctcagatttctcttcaatctcataattagttcttgagggcttagctcctaagcttcttgctgctctcgtagcttttgggaaggatggtgagttttaggaaaatctatttccttagccttccttacgatggctcaatttattaaaggtcatggagttgaaaccccaaagggggtcccttttttttgttttcttctacaatatttacacttcggtttcagcagcatgagttgtgttagctgccactaacagcacagcatcacaactcttaaatgtggctctttctgtggacatggagcttaaaacttgctttctggactgtcctttcttcctttcatttattgtgagttttgcatcttaaataatcttaagctcagtaagggcattcaaggagggaggctatctgaaaactgtggcaaaacagaatgctagtgcctacggagctggctgtccttcttccctgtctttcactgttatttaactttatattatacatatttatgttcaatatatatttgcctccatgaaaaaaattaagtactagaaggaaaagtctgagataaataaaactgactttagatgaacagaacacgcagacaccttgttaagaacaaatgcaaatcaccctttgtcagtggctgttgactgaatgttggtgtgtgcgtttgtgtgccttttaaagtattggtttttttttcctgatcatgtgacaaggtgtatttctacttaacaactacaagaaatttttagagagcttgtgatttacatttattttgtagtccacacttaatatgaacagaggcaggtgaatatatgcttcctgaattgtttcttcaaccaggaagaaaaattcacacactgaccctgagcgatctgtaggcattagcttgtcagtctccagtgcaggtaggcccatacagttctgagaagcatggctggagctggaaggaaatgagcagtgctcagaacatcaatggctctgttttgttttcttttgctttgagctaagacagttgaacaggaaagtgagagttaacgccagtactcatgctagacacttttctatgccataggaggtaaaggcggcacatttttttttctttgcctaaaaaaatctattttacagaatgtgttgttatataccatgtaaaattggcttttaagaaaaaaaaaagaccaacaaacaaaattaaataagcaaaacacacgtaagttttgttcatcaggaatgttgttttatttattgccaagtgacaaagagtggcttctggaggaaggtgcagtaggtggaatgctgccactgctgccactgactcccgcaagagagagcttcctaattcatacaaagcacaggccacacagagtttatgatattaccaaatttaccttgaaatatgctcactgagatattcagtagtcggtcatatgcaggtcaataaagtatttgcaaattacagtttgtagaaattaactgatacgagtaaaatgcccagagcttgaagctgattactcttctcttagtgttagtcagagccagagaagcagcatttaatgaagcaaacaagcatgattgggcatgatggcttgtaaaggcacgagggaaggatagacagttagaccaggttgttagaagcaaatgatgattatgaacatattccttaccggtgtacatttgtattagtgagaatacatattgttacgttgtccacaagtttgtatgtattggtttgcttttaatcatttgattattttaaatctgtatgtaacggtgctgtttacaaccacgatgaagtgattgtgtttagcaattttcatgattgatttggtgtaaattttacacagacggcataatcgtgcttataatcatttattttttaaatgtaggggacattaagcaagagcctggaatgtaccgggaaggacccacgtaccagaggcgaggatccctccagctctggcagtttttggtagctcttctggatgacccttcaaattctcatttcattgcctggactggacgaggcatggaatttaaactgattgagcccgaagaggttagtctaagtagattttgagtaggaatctgaacagtaaacatctgttcagaggactagttttgcagtagaggacaggcttcacaccaaacacacatcaaatactcaggagtgggaaaaccgttgctaattgtttgggtgtctaaattttctaagatatttagagccccatgtgactataaagaaactttgatttcctgtagatgcacttcaatgatggaagggaagaaccacaaaattatcctgctggcaacataggctaacgatgcctaacagaataatcacagagctctttaccgtgatgggaatgcatgattttaataatcaaagctagacttggactggagaagttcaatgtggctttgtgtcatttaaacaggcattttcctccacctgcaattaaaataaactgagcagaaacagaacactttacatttgtcatatgtgttaggacaagagacattactgaataatatcagtaatgttcgagccactcaggagagacaacattctgtgagtgagtgactatatctatttagcagcctatggtatttatgtgtttgagtctgaagagaagaatggagaatctgactaggtgaccagtcaatgccaacacattctgagttttcttattatttaaatgtgagaaagatacaacatcacatctgtttcatacaattgatagttcatccactttgctgtcacagatgcataaaatcaataacaagactcaataattcagtcagttgactactttcaaatgttgacaagctcactaggaattgtgcaataggcactacatgttccctatgcttttattccacatctgggaatccctaggggcctgagaagacagctcagtaactaatgtgcctctgcacaagcatgaggacttcaattctgtcccaggaagccatgtgcaagcatagcagttgatcccagcccactagggccagacacagaaagatcctggggacccagtggccatctagtctagctgaatcagcatggttccatgtttaatgagagatcttatctgaaaaggcttggtcgagactgattgaggaagacacctgccatcaaccttgctcatatatgtatataccacatacccccacagccaaaaaaaaccctgaaaatgttaaatagtctatttcttattggtgcctacttcattcttaacaatcatataatcaaacaatgatcatgatgtttcttctgatttcttctttggaaagaactcttgaattattttagtctgtgtggccccacaggtcctctctagtctccactacataacaaatctttccgtgatgagcaccacaatccatgagtgaggatttggaagctaccatactgttcaactcacaggacttattttctcatctttcacatgtcagtataaattataatgattgaaattccgagtctgccatgcttatctgctctgtctgcttggataccaatagcaaacacagctctctctttcaggtatctgagataatggtatattacttacaaattagtcaatcatcctaggcaatttttcccagaaacactctttaacatagcaagacccttgctagattcaaccatggtcttttgttgacgctcgagctagttgaacatcagggcagtcagattgtcagaccccaggctcactgtcccatagctaagcatgaccttccaaagtaatttgatgggctggaagatacaggtcactggtgcagtgctagccttgagttcaaacactaacaccaaaaaaatgtatttattaatataataaaatagagttatacttaaagtattaaactgattcatttaatgtcactggcagcgaaaacgcatgccaagacactgttccctgtgtgctcctatctaaagtaagacatgagaaagtcttcttttcattttgagagtccatgttaaaaaccgttccttaactttgagtgattgtatgtatggcattagtggtacttagggggaaccaagtggatgtagttttttaactgcctggaacctatttaggcttcctgctaattttagacccttttgtctacattatatacacatattgttgtctatttttaccttacgtttgtgccaattgtgacacaaaatatgtctaagaacagactttctttacatacagactaataatccatagtgctgagaatctattggcattataagaagcagactctcttaaggtattcacagcagttctgtccctctccagagacttctatggtgccttaaagttcattgccttttaattttgaagagaactcttaaatggcaaattctaataaagactaattggtaaatgctgtttttcaggaactgttgcttaacagaatttttcacacttgcgagcttttgtggctaggacacaacttggtatctctattgagcaactgatagccttcattacacttttgaaggatgttacttaaaaaaaaaaaacctataaaacaaccccaacaaaacaaaactgcgctgtgggttgttcgtctgtctttttctttttcccctcccttgttttctctcttgttttcctctctcccccttttttttctttctctctttttataatatcaaaaaaaaaagnnnnnnnnnnnnnnnnnnnnccctccctccctccttccctccttccctccttccctcctttcttccttcctttcttccttcatagtctatccctcatctccattctgttcctcatttcagggtctcatagcccagggtggtctagaactcataatctcctgctatagtcttagtctcatattcagctcccaggtactggaatttccaacacacctcaccatgcctggcttgctttcctttcattttggcacctgtccctgctgcattcactattgcttagagcatttactgtaaagattgtggaaaattaagatgtgttctcccctttgactgctggcttgaacgaatagttttgtttctgctcgatcgtatcactactcacagaacagtacaccaatccatgtgattcaacatgattatttgttcatttcgaaaacacaaactacttaaagatgggtggggtggggtgtgggtgacagattgctgctaaccaagggaagacacgagcagagagatgattctcaggactctttttgttgataggacataacttggaattttgaggaaacaaaggctcatgctctgttttgggcttgctcaggctgagcatgatctttcctcagactaccaaagaatgaggcttaatgagatctagactgcactggggtgagagaaacaggctcctctctctgtatgcctccgtcagcccagcgtgatggtgaagtggagtggtgccattgggaaggagaagtggttttaagctctgttggaaagctctgtcctaaccacatccatctctatgaccgtcacatttgaaacccttctgagacctttatgaaagccacactgtggacattctgctttaaaaggaaaagactcatatacatggtgacttttccacttccgccttatttttagcatccaattaatgtttcctaaatgagtttaattttccagtttggggttggctatagttttcttagatgctgatttaggcaacaattatttgtacttgagcttattaattggcatactgttccccctgctgcctcactgccagctgctggtcactctttcttcatacaatctgagcagagtctttttttttttctttctttttttaacaaatgcaatagaacacctttacaaagggatcattaagcagttcctaatctgggatttctttttctttttcttttttttttgtctgaaagttcaggaaggaaaagactgctagtgtatggcagaagggaaaatctgcctcattttggtgaattgcacagtctgttctttcgtgatgcaaacacattcccttatttccatttaatttctatccaaaacaatggtgacaaaggatcctattgtgacgttgaaaagagagaactgtaagcctggtttaaaccaggacacagggaattcacaacatgaaggctgttgctgttgctctttctttatgccttagatttgaaaggtgcgtttagaagtcatatatttatgaactctctctctctctctctctctctctctctctctctctctctctctctctctctctctcctctttgtgtgtgtgtatgtgtgtgtgtgtgtctaagtgtgtaagccagtttaagactcagcactaacaataggattctgttttggtggcaggtggcccggcgttggggcattcagaagaacaggccggcgatgaactatgacaaacttagtcgttctctccgctattattatgagaagggaatcatgcaaaaggtgagatgatgattcattaaagctcactgtgacggtgcccattggtctccacgtcatatttttagagagcacattatcagggctttgcttcagtcaggctttcccccatgctgacacaacttggctcctgcttaggatatcaggactctatttataacttcatggacattggacataaatgtatagtggtatctaccaaatgacaatctttctggaagctttcactttgctacacatggtaaacaggtaatttcagtattgatactggatctccaggtctctaaaggctgtaattttattgtacctcagagtcacacatttttgaaatgcttgttttttttttcttgttctatttcttttttgcccctaccttcctttggttttttaagacagggtttccctacagagccctagctgtcctggaactcactctgtagaccaggctggctttgaactcagaaatccacctgcctctgctcccaggagctgggattaaaggcatgcgccaccaccacccggatctcttgttctggttcttaaaacactcaggcagcccttgttcttattagaaaaagaaaaaaaattttttttcttgctagatatcttgccttatctcatcacttgacagtttactatcccaaactacttgcctgaaataaatgtttcatcttatttggttcatagaacaaagttcaatatattttaattcaaatgagcttttaatatttaaaagttcttttgcataaaatacaaaaacatggataaagataaaatgtacttaaaatataacatttataaaggaggccatgaataaatgaatatatgaagataaaacatttggatatttgttattatttccttcagccttgtgtggtctgtggcttatatagccctacatgtagatatgaatcctgcatggaatggactttgcggatgccactgtttggtactaggaagggaggttgtttatcacaccaacgtgcaaaacttggagtctgcatgtagctagtaaccaatcagggccccttagactcttagcaagttctcttagcctccttataagcacagtgtgctattttaagaaacattcatgacttctatgagacttctttctagaatgttctgcctgtttcatgatatctcttgctatgggtatcgactatcctcatggcaaagtaaattgtagcatagtttattcagaggaactctgtgtctccccattttattacataaaaatatataatggggaattacattcaagtctgtatgaccatatttgctcattggcttaaaaccttaattaggcacttgtgctgtgtgaaaagagcagttgaattagaagcctgaagagtaaaataaaaataaccaaatgggttaatgcaaatgaaacattataaatggttattaatttccatatttctgaaatagaaatgaatgctgaaaaatgtttattgtacttcgtagataaaatatgtgcacatcttgttaaacatgtagcaatgcttagaatacttaagcaatacataaaatatttaagtattactatactaatatagtaatgtttgtattctgcataatacaattatgtttgcttcttttgcttatcatctatatttgatattttatttatttaatttaatattcatacataaatataatttatttgggtcaaatatacccctattccttctccttcaaattttagaaaaaattattatatttatttatttacttatttatttagtggtgtgtgtgtgtgtgtgtgtgtgtgtgtgtgtgtgtgtgtaccaccagtgtatgtgtgcaagtcagatgataccttgcagtaatcaagcttgactttccaatctgtgggtcccaggtgtcgaattctggttgtcaggtttggtgtcaagtacccttgctgaaccatcttgaaaatttaaaagttgaaatgtaatttaaatatctgtctgggctttatttgacagatctacctccctgtttacttctgatatgttcctccacaaaatccctgtgttttgtcacctcactgttgcctttagctttacctaataacctacagggcttcttacaccacaactgtatcactaaccaaggagggcatcattcactctgtttgtatgtcagctttaacggggtggaaagtatggaggtagcatgaaagtgttccctcacaggaaactagaaggaagtagaaagcagaagttcctacgatatttgatgatttctgctgcatattgtacatttaaattcctcatgatgaaatcgttctcacttattacattgcttctaagtgaagacaaccccaacatgtcaaacgtgtcagacaaaacaggtgcactccctaaagcaaacaattctttttctgtagccccaaactaaacagagtgggctatagaagactcagaggcatgctgaatacagcatttattttaccttcgtttcctgaaagtagtttgaaaaatagggaagaacggaaacaaaactaagatatattctgtatatctcagcttttgtctgaaactgcctggtttttactttgggactcacttcattacttcattccgtgtgtgtgtctgtgtgtgtgtgtctgtgtgtgtgtgtgtgtgtgtgtgtgtgtgtgtgtgtgtgtgtgtgtgtgaatgtgtgtatgtaatgaggtctaaaggaggagagttaactaggtgtctccatttgctttgaactgtgctagagtttttctatgcatcacagctggccttccaaggagcccttcctgtttcaatttcacaagacaaggaactgaagagcagtttaagaaacatgtccagattcataaacatctctcggggttggctctttcaaacctctagatatccagattacttggactctaatgtggctccttttacttaaattcagggcaacaaatattctaactctgagtccagagcagcagactccttggcagtcattccttgtctcccaaacatgcacagagagtttataaactgtgagcacactgcttccccatgtcacaaatcaactagcaagaccttttgacacagaaacaggagatggtggattggtttcagctatctgaagttgtgagctatgtacacacacacacacacacacacacacacacacacagagagagagagagagagagagagagagagagagagagagagagagagagagagagagagaactgtcactgtcacacttcacacagggaactgcctttgttccccatagatcccctgggtcttgagttccttagcgttgtctattaatggcagatacatctgtctctctctttccattgtttatcagtttctacagaagcattactcttcacaacttaagtttggggcatgtctttctctacaaattgtgctacatctcctttatttcaggcgcttgacacatttccttttctcatttcctcccttcccagtgtgtattttagattcctttcactttttttttacgcctcttacttcaatttgacactttacacacatccttaagtttcatctaacgtatcttgctttcattttaaaaagtgatgtgctcaggataatgttcttctgctccatccttcatttaaataaggctatgtatctttgggactttcttagatggagggtacacagtaccagaggaagatgcaggaaaaagaagcagtgcatcctgggtatcagtgatcactactctactcttaggaataaaacacatttttttttcttttaaaacttgaaagttgtagaaatataatagtaagggaaagataaatcttaaagagattttccaaagcatagatgttacctttaaaacaaataacaacaaaaaaaccttcaatgtgaattgcttacattatatcattgatttttctcccaccaatgacagtgtaaatgcatctttatgttaaaaaggcaaaaacaactgctgattttcttagtttttcttagaattaattattactgtagctcaacattttgtatttcccttcattgaagcatggcttatttcacaaagtaaggactcttcccccatgaagatgtgtctattacttagttgcatagtctcttctggcctccatttctgctgatctgttaattcatgtttgtttctctttcccttactcctgtggccttttctgtgatattctcaggtggctggagaaagatacgtgtacaaatttgtgtgtgacccggaagcccttttctctatggcctttccggataaccagcgcccactgctgaagacggacatggaacgtcacatcaacgaagaggacacagtgcctctgtctcactttgatgagagcatgacctacatgcccgaagggggctgctgcaaccctcacccctacaacgaaggatacgtgtactaacatgagtaacccgtcaagcaaggcaccccgtgcttcgcctctttttttttcaagatgcagagaatcaccgaattctcttcgatgtttgttttatttctgttgtttgtactttattttttaaatgataatacaaaagggggcttttcctgttgcattattctatggtctgccatggactgcgcactttatttgctggtgggcgggagtaatctagacattcattctttgtaacaggaagatggcggatgagtgggcagaaggagctgagggattcctttttgcttaggcttggaatggagtcctacaggttttctgtatgatgatgctatatcatatttgttcgatttcataataacgtaagataattttccctgggtatctacggtacagttgatttcacgttgtgtaaatatcttcttggagaccatttgccttgggcatttcccccatcattactgagtctctgcaggtgtacaaaaatctactgtaaatggcagtttaatgttagaaattactgttttgcacctcttgtaaaaaaaaaatatttagcaattgcatttgttgttctttctgtttcataatgctttacagatgacttgtagaggaaaaccctaaatgtgggcaattctctctgaagttgagtaatcaccatgactgtaaatgagggccaccgttttggactctggctccaactgagtcacaggccagtagcattttatgtatctggtgccatcctgctgttttggtactacaaatactgtcttttaaatatgttgatgcccatctcacttaaataatgacatgtcatgatccttcggaatcttcatttaagtgttaaagctgggatcacaatgaagcaaaaaatagaaaaagaaaaaaaaattacctgtctcctttcactatcttcagtacataaatacattatttaatcagtaagaattaactgtactaaatcacatatgatgctgttctagttacagcaagcactctttaagaaaaatatccactacactaaataggtactatagtaatttttagacatggtacccattgatatgcatttaaatgtttcactgctgtgttctgttgataacatatataaatattagataatgctaatgcttccgctgctgtcctttctgtaatattctctcatgctgaatttattatgaccatttataagcaatgcagttaactacagatagcatttcaggacaaaatagatgactcaaaccatttatggcttaaaaaaatagcttaccaccttgctatgctataagcagcttctatgcacattgacaaacgaagagtgagcctcagcttgctaaaggaaactggggaaacttttgtaacttttggtgaaatggaacattgtttatgaactgttaaagaatatgaggaagttcctgtgtgacatagtgctggcactgatgttgtccttcatctcctttggacacacctgtaaatgtgatcagattgtacgaaagacgattcaaagatctgaaatctcaaagtttctgccttgttttcattttgtttgctgttcgtttggtttattgtccatccgaaaatgacagcattgagcgtgtgccttgctgtttcattcactctgaaaaccataaggaaatggtgtctaaataccccctgagtagctgcttaccagatccaagcaaagaaaatgaattgtgttcacttcgttactactctggaagaacagcttcataaagagcctataggaaaacactatttcttagaaaaccattaaagaccaaataaacccagggaagcagttcaccagcacaagaaagaacttgtgaagacgagccctcagtatccttcccccaccccccaaccctctgcagatcacagttgtttccgtaacataactgtcccttcacttactctccccatgcacaaatgggcactatccacatcctccagaaatattctgatccctgcagatgtctataaatgattccctcgactgtgctgcatgtgtttcttctggcccttcatgggctgataagtatgccttaaaaatcaggacagccaccatgaccatgtggctttttacagcacttggactttctaagtaaccagcgaagtatttattggatagacacccaagattgagctcttggtaaaatagaaaaattctaagtgtggattgacatgtaaatcatattcaggagccttttctctgtctatagttcttcccctatccttttaatattcttgtcctagtcaatcagagaggaaaatttggactctgacttactctaacggatcaaaagagggatggtattaattttgatgtataaggaaaactatatgttttattgcaataggtagtgtttaaatggactctgtaaatcgtcagctagcattaagtatttctaatatgaaaaatttcaaaatataacaccataaagtgtagaaaaacagattttatgttctgatttcttccttttctttctccttccttccttccttccttcctttccttacttcctgccttccttccttccttcctccctccnnnnnnnnnnnnnnnnnnnntccctccctccctccctccctccctccctccctctctctctctctttctttctttctttctttctttctttctttctttctttctttctttctttttttagattgattaaaaaaatcaagttcctgatgtttgcaagagtcttgcattttgtatttcaacagcattggctacaaagcataggaattagtaaagtagtcatttttttcaacttgataaaagaaatggaaagctacatctactagtgtttgatgtctctagttgaacatctgcatatatccaatcatttctttaaacaaaggatgttaccttccaaatatgtcatgagaaattattttcttaaggggtacttcaaaagcaaaatccacaaaactgagtatgtagtatttcttaaaaccacagaagacttgcttcctgtagatgctataacaaatttctcagacttgagtaacaatacaaatgtcctgtcttacaatcctggaggtcaaaatttcaaagtcagccttagagggctaaaactaagatgctaggaacagcaactcattttgaaggctccagagaagccttgttttttccattttctgaggctatataacaacatttcaattttgcctccctgtttatgcccctttctctgcactcacagatctttctagcttcctgcaagaacacataggatgatatttagggtttacatagaaaacccaggttgatcttccccttctcagcctcctcacttatgctgtttgtaccttttaacagataaacaattcataggttcttgggttataatgtagctatggggaagatctgggaaaggctatttattcagtcttattcagtttcccacatagccaaagaccccagagagcaaaatgctaattgatttattcatggaaaaaagttctaagattagtacatactaagggatattgtcatgtaccattcaaatttccccttactttgcataaatacttttaaaaaagtacctcagtataaaaattctcctattctagtaaaccatctggattatcacatcaaacctttatatgatttaaatatccctcctctcctggttaaacacgttatggtaggaaaaatagctaacctgtgataacagcaatagcaccattaaatctgatgctcctgccatagtatgtttttgcaaagaatttctttaacatcaatgagttcattctctatgattgtcagatctgcaaatgataactgcttatcagtaagaataataaacagaatatgctcttgttaattaaaggaacaattctaaaaactgacttgatttctttttatactgaagtgaaaaatatttcttgactgatatcacagtgtttgcaccagattatagggttccaaactgaatcatgtttttgattgtgcagcctttccagattatataatgatgaaacatattggaaaaaaattgaatgcttagttgagtccttaattttttttaaaaaaaatctgacacaaataagctattttccaggtgcagtttggcatggacaagagatattaaaagtaggcaaaaaatggaaagaatcaatttaaagaaggcagatttgtatgttggacaattgcaacaagaatttcatagaagtcaagttccataaaggtatttatgttgcattcagtactaaagacatagataagtggtgcctaggaggatagagagagggtggctgcttttgagttctttggaaagctgaccaaatttaatgagaactcaactactctttttaggactttattttattttattttattaaatgaaactgacttagacactttaaaaaatatggaaaagtctagtttaagaagaaaaatctgattagattagtgggtgcctttataaaaatattgatggttttggaatgctcaatgaaaatgtatatacaatagctgtggtttaagaattcatatataaggtaggttttctttccgcttatgaactccaatattcttacttagttccatttgaaaattatgttactatgggaagattttctttaagtttgcttggttgtattaaaattataattatagtttcagaaagcattatgaaattcatgtggtgatagcaaactaaatatggtcaaaatttaagtctaaaataaaagcccagaaattgaaaatattgggttgtcgtgatcactcagtatggttgcacattcataccctgtgaatgccatctcagtgctgactgcctcttaattagttacagtttgaataatttatgaccaaactaataattctacactgtggtcctttcttcttcctcttattttctgaaggatttagatatcatgacacttaatacatttttccagttgtgttccaatttctttagatatatttcattaaatctcaagaaatgtgttgaggaggaaaaaaaaaaaacagaatttgggagactcaacaagggcatgtgacttgtctatactgcctcggctgtgacttgaattgtctaatgagctgacaaactaacaaatgtcattgtgttgagatgtcaggagcttacaagtagattcataacttggatgcagctgtgctctcgatttagcttctcatgataaaaactcctattaccattacgttttgctgaaccagtctttagtcggctgctccgtctgacctttggaacactctttgtagaaaagctaagaagtgaataacgcaccatttacaacaacagtcaagacaaatggaaatgagcaaagttccttttgattcctttccactggagaaaattccagactaattttcaccaaagaaatccatgtatagattctactcttcagtaagctgaacacattgcatagttagttgaaaggaaaacgggaatctttagaaaacttctgaagtaaaacggggtcggtcccatgatttagaaaacacagaagtggctaaagagcaaaatggaacaaaaccaggaagtgttatataaacatatctcaattattatgtcttatttctgttaaacgagtagcaacagcgtcatgtacaggttaatattccaagttgcttgtaaaaccatcatagaaatttacaatgatggtgaaaataaaaaaaaaagataatgtgtgtgactggacttttcgatctgaaaaaatgcaatcttgtttattcgggaaccaagcatgggcctggcacttgcaaggcaaggctttatttagtgttactactggctacactcccctcaacactgctatttcattggtaatgggccgcagaaatgttttctttgttttaaaaatagttttcaaacttaaatttaagcaaaattttccatactttgtgaaaatttggtatgttgcattcatggctaaatctacttgcttgataacatcctagcatccactgtcaataatattcagagtagtgtataaccactcattttcaaaatgttttcatttttcttagtcatggttttagttagggcttttttttctccccctctcgcctgtcgtcttctttttcttctccctccctttccttctcttttttctcctttattcctctcttcccccccctcttttctttcccattcccttccttctcttctatttccttctctcttctctccctgtttctctttattacacctattataatctcctctcccccctcctttctttcttctttttcaattttttccctctccttattttcctctttctcatgaatnnnnnnnnnnnnnnnnnnnnccaccatgaccaaggcatctcttataagaacaacatttaattggggctgacttccagggtcagaggttcagtccactatcatcacagtgggaccatggcagtgtccaggcaggcactgtgcagaaggggctgagaggtcaaaatcttcatctggaggctgctagaagaaatctgacttccagacagctaggacaaggccattaaacgccaagcccacagtgacacacctactccaacaaagccacacctccaaatagtgccactccctgaggcaagcatatacaaaccaccacagtcatagtatttaatatattccgggtgatacttacttttgaattaggatctgaaatataaaggtattgcaactttatgctgtattttaaatttcgattgtggttaatttactagtaggttggcttgaactttatatatatatttgatgtctttattaaaaaataaaaatgtctacataggccaataatcataccaaggaaaataaagtatatttaaatagtcagctaattgagcatttttaaacaactcagtctatacaacactagcaaatacaaacacactataaatacatactataaataaataaaaaaacatactataaatacaaacaacactagcaaatacaaacagttccttcaaacaaatcacatttggtctagtgagatggctcagcagatagaagcccctgctaccaagccagattacctcagctcaaacttcagaatttacaggattgaaggaaagatctgactccttcaaggtgtactatgaccttcatgcatgtgctgtgggacacatgcacctctgacactccaaatggatggatggatggatgcatggatggatagatagatagatagatagatagatagatagatagatgatagatagatagatgatagatagatagacagatagatagatgcatagacttaaataaaagtaatttatagtttgacaataacaaaatgaccttttgctttcatctttctttagtctgaattgaaagactgttattaaaaacaaattctagagtataggtaagctctctaagatactggtactgtagataacatatttaaaagaaacaatttcaaagcacacatttttgggctatcatgtaatgaatctgaaatttggccattgggagaataataggcaagctttctctaccctttatgtttttctttaagcactaaggactttctaaattaaagcatgatgaatgctgtatttcctctaactttccaattgtcttctttaattttttttctaaatctgttagcaagaagacaaactgatttaagaacaagagagtgtggatttggttcattaatgaaaaagaagttttctaaaaatatcagatttctatatcatattttctttctccttaaatatctttaatattcttttcctgtgtttatttattcttatataatttcatacagtatattttacttatattcttttttgtcgtccccccccccaaccaccctagatcgtttcactcaacttcatattttttatctcttaaaataaaaaacaaatggccactaaaatgacatggagtcatttgtgttggccatactacatcatgaggcttgccctggagcatggttaatatgcccagtgacactccactcaagtaaaccgatgttccatctcccagtagctgtcaattgcaaatatcttcttggctggggtgagactatgttcatgctgaaattccccttcttcatgctgaaatttttgtctgtcttaagtcttcctcatcttgtgaggaggtctctgtgagtccatttgtgcacctgccctgttgtgtctggataatgttgtttccttgaagtcatccatcatccttggatcttagtctttctgtgtgacccccacctctgcccttctgcctagatccctgagatctgaagggagggatatgataaagagccctccaaagttacttactccaaacatcatctagttgtgaatggctatcatgcatatctttatttgcagctgaggaagtaaacataacaattaaccaaaatattgtcattcagacagatttgcatgcttgcctctgaagttcactatcgagaatactatgaaaaccaatcagttataaaaagatttcactctacaacatcttttgtggttcaatactttagtcctttgggattgtgtacagaaagactgttacttcagttttactagggtggactttagattatttgtttcagtttgttctgtgttatgaaatccatgtatccaacccttcaatttccccacatgtgagtcttctaaaaattaacattgaacacttgcataaaatcaattcaattgcatgagtattttgtccaaattaaatttctcccatgtaagatagatttatagaaaactatccttttcctaagactaaatagaactaaacaataaaaatctatcacagagatgagtataaattggaacacatcgtgtagtactgactgtatctgagactctacaaaagaagtaatttaatgctatctagcaatagaacagaataattttattcaaataaatttgtaagtttaatatcgcccattgttatgacataaagcagttagctaatcactaactacaaatgcacatggtatataatgtacagaattagaagatttaagaatcaaagcagtgcagacttattaacttctggactacactgattaaaaacatttacaagtgccctctctgagcatgtgcacagactagattccttactgtgcagtgagaggttgttgtgttattctgtgttcctagctctaagcaacagtaaccaactggtatagaaattgtcaaagcccaggctctcttttgtagagagggtggctattttgggtatatcacctaacaactggcctcttaccctgagtctaacactgacacccacaaagggccatagagatgagtcacaagatcctacccagcagtgatggatttcagaccttgatctttctgtccactgacctgactgatagcaggaaactcaagttgatatctgcctgtgtcccttccttgtgtggaatactgttcttctgcctgagactatctcagcttacacacctgcccctatactgtgtccaattttactctcagtgtttggaaaaatcaactcttcacctgtagccagtcaaaaagcctatcaaaaatgttccgtttgaggattccttgagggaaaatttttacactactgttccagagcaagtaaccttgaaaagagaattttctaactctgataaaattaacctgtttctcccttccatatatggtagcccataacaattatcatggatttagttttcatgaatttgataattcaagatatactatcagaaaagggattgtaaaatgtaggaattagaggcataaacatttaagaatgaagacagatcaaggtactttatcatgcacttctggctatcatagtccttactgcaccgatgaagaccgtttctccgctcttaacctcataagagtgactttatctttaaatcctgtgtggcaatccctgacacacctccattatgaccaaagaagacagagcagcctggaagtccaaataatttcttcaggttatccaacatttgcaagtctgtggtgctgctgggccagaaaatcatggtgtgcaaggccttcctaagcatctggcaaacaactgagctctgcagaaactgttgcctcatatacaggggttggggcctttgtgttcaccaaggagaatctccccaagattagccacatgtcattggccaataagagtccagctgacacctgtgctggtgccatagcactgcgtgaggttactatgccagaacactggtgtgggacttgagaacacttcttctttccaggctttagtcactactagtaaagtttccagggacaccactgaaattctgagtgatgaaattgtgagtgattttaacagtgaaattctgataaaaactggagacagcgtggaagccagtgaagccacactgctgaatatgttgaccatctccctctgatcatcgagcagatatttgacaacggtagcacttgcaacacggaagtgcttgacgtcacgaagtaggctgcgcttttgattcctagcaggtgtctgaaatgttggcagtgtttgtctgcggattggtttgcaacttgttgacttaataccagcttaatttgagaaatctgaaaataaaggcttacttttcctggaggaggatgaagataagggaaggagaaaggagagaaagatggaggaggggaggagggggaggaggnnnnnnnnnnnnnnnnnnnnaaagggatcattaagcagttcctaatctgggatttctttttctttttcttttttttttgtctgaaagttcaggaaggaaaagactgctagtgtatggcagaagggaaaatctgcctcattttggtgaattgcacagtctgttctttcgtgatgcaaacacattcccttatttccatttaatttctatccaaaacaatggtgacaaaggatcctattgtgacgttgaaaagagagaactgtaagcctggtttaaaccaggacacagggaattcacaacatgaaggctgttgctgttgctctttctttatgccttagatttgaaaggtgcgtttaagggggaggaggaggaggaggacttcacacattaaactgaatacaagttaaggtatatggattctggatatatcctccataaaaatgaggagaggttctctctctctctctctctctctctctctctctctctctctctctctcttttaggaaggaaaaaaagcttactagagcaacagcaattagaggacacaacttttagaagttacaataatttagctttaaaaaacatggctttaggaaataataaagtctacttaggttccta

SEQ ID NO: 294 - DNA, 2852 bp, Mus musculus
cagctctgtcagaggcgctttcggcttccaaggggaagtgctgggcaataattaatgtttttattaaatttggagggaattttttgcagccgttcgcctagcgtggccttcaggttgatagaagtccagatcccgaggaaatctccagctaaatgctcaaaatataaaacactgagctaatatttgcgaagaggagcagaatggatggattttatgaccagcaagtgccttacgtggtcaccaacagtcagcgtgggagaaactgtaccgagaaaccaacaaatgtcaggaaaagaaaattcattaacagagatctggctcatgattcagaagaactctttcaagatctgagtcagttacaagaaacatggcttgctgaagctcaggtacctgacaatgatgagcagtttgttccagactatcaggctgaaagtttggcttttcatggcctcccactgaaaatcaagaaagaaccccacagcccatgttcagaactcgggtctgcttgcagtcaagagcagccctttaaattcagctatggagaaaagtgcctgtacaatgtcagtgcctatgatcagaagccacaagtgggaatgaggccctccaatcccccgacaccatccagcactccagtgtccccactacaccatgcatctccaaacacagctcatactccgaaacctgaccgggccttcccagctcacctccctccttctcagtccataccagacagcacctaccccatggaccacagatttcgccgccagctttctgaaccctgtaattcttttcctcctttgccgacaatgccaagggaagggcgtcctatgtaccaacgccagatgtctgagccaaacatccccttcccaccacaaggctttaagcaggagtaccacgacccagtctatgaacataccaccatggttggcggtgcagccagccaaagcttcccccctcctttgatgatcaaacaggaacccagagattttgcatatgactcagaagtgcctagctgccactccatttatatgaggcaagaaggcttcctggctcatccaagcagaacagaagctgcatgtttgagaagggtcccaggcagttctatgatgacacctgtgtggtcccggagaagttcgatggggacattaagcaagagcctggaatgtaccgggaaggacccacgtaccagaggcgaggatccctccagctctggcagtttttggtagctcttctggatgacccttcaaattctcatttcattgcctggactggacgaggcatggaatttaaactgattgagcccgaagaggtggcccggcgttggggcattcagaagaacaggccggcgatgaactatgacaaacttagtcgttctctccgctattattatgagaagggaatcatgcaaaaggtggctggagaaagatacgtgtacaaatttgtgtgtgacccggaagcccttttctctatggcctttccggataaccagcgcccactgctgaagacggacatggaacgtcacatcaacgaagaggacacagtgcctctgtctcactttgatgagagcatgacctacatgcccgaagggggctgctgcaaccctcacccctacaacgaaggatacgtgtactaacatgagtaacccgtcaagcaaggcaccccgtgcttcgcctctttttttttcaagatgcagagaatcaccgaattctcttcgatgtttgttttatttctgttgtttgtactttattttttaaatgataatacaaaagggggcttttcctgttgcattattctatggtctgccatggactgcgcactttatttgctggtgggcgggagtaatctagacattcattctttgtaacaggaagatggcggatgagtgggcagaaggagctgagggattcctttttgcttaggcttggaatggagtcctacaggttttctgtatgatgatgctatatcatatttgttcgatttcataataacgtaagataattttccctgggtatctacggtacagttgatttcacgttgtgtaaatatcttcttggagaccatttgccttgggcatttcccccatcattactgagtctctgcaggtgtacaaaaatctactgtaaatggcagtttaatgttagaaattactgttttgcacctcttgtaaaaaaaaaatatttagcaattgcatttgttgttctttctgtttcataatgctttacagatgacttgtagaggaaaaccctaaatgtgggcaattctctctgaagttgagtaatcaccatgactgtaaatgagggccaccgttttggactctggctccaactgagtcacaggccagtagcattttatgtatctggtgccatcctgctgttttggtactacaaatactgtcttttaaatatgttgatgcccatctcacttaaataatgacatgtcatgatccttcggaatcttcatttaagtgttaaagctgggatcacaatgaagcaaaaaatagaaaaagaaaaaaaaattacctgtctcctttcactatcttcagtacataaatacattatttaatcagtaagaattaactgtactaaatcacatatgatgctgttctagttacagcaagcactctttaagaaaaatatccactacactaaataggtactatagtaatttttagacatggtacccattgatatgcatttaaatgtttcactgctgtgttctgttgataacatatataaatattagataatgctaatgcttccgctgctgtcctttctgtaatattctctcatgctgaatttattatgaccatttataagcaatgcagttaactacagatagcatttcaggacaaa

SEQ ID NO: 295 - protein, 350 aa, Mus musculus
NTELIFAKRSRMDGFYDQQVPYVVTNSQRGRNCTEKPTNVRKRKFINRDLAHDSEELFQDLSQLQETWLAEAQVPDNDEQFVPDYQAESLAFHGLPLKIKKEPHSPCSELGSACSQEQPFKFSYGEKCLYNVSAYDQKPQVGMRPSNPPTPSSTPVSPLHHDNTAHTPKPDRAFPAHLPPSQSIPDSTYPMDHRFRRQLSEPCNSFPPLPTMPREGRPMYQRQMSEPNIPFPPQGFKQEYHDPVYEHTTMVGGAASQSFPPPLMIKQEPRDFAYDSEVPSCHSIYMRQEGFLAHPSRTEAACLRRVPGSSMMTPVWSRRSSMGTLSKSLECTGKDPRTRGEDPSSSGSFW

SEQ ID NO: 296 - DNA, 117829 bp, Homo sapiens
agaggtgtttcgtggttattatgtctctacttttagtttactctctcgatttggtggggggatgttatattatctgtgcattcctaacataatacaatgtgtgcacactgtagatgatcagtgtgaatagagactttaatgtgaagaaataagtttaaacttcagtatagcagatttagttttggtataattaacataacctaaccccaagatgttaattacctaaataaaattgttacttgaagctatggattttctttattttagcagttttaaaaatagtatgcatacttatcaattccatcaacaaatagtcattgaatatcaacaatgtggtaaacattctgctagatgatgagaatacaatcatgaataagataaaatgcctgtcctcctggaagtcataagcctaattgtggaagcaatattgcattaacaaggacagcaaataaatgtattcaatctgtgataggttgaacatcctaaaaagaaacaaggtctttagccagcttctaagatgtccaccaatgatcccagcatcctggtattcacacccttatgaattcacaccccaccttacactgtaagaagattgacctgtgtgatcaataacctatggtagaagtgatggttaagtcacttccaagataagattgcaaaagaccatgggctccatctcgggctctctcagcttattcacacaaggaaggtcatgttgtcagcagccttatgaagaaactcacagagcaaaaagtgaaagtatatggccaaaagtcaacaaggaactgagacctgccaactaccatgagtgagcttagaagcagatttcctagccacagatgactgcagccctactcaacagcttgactactacctcaagagaaaccatgagccagaatctaccagctaattgctcctagattcttgagtcaaggaaactgtaagattataaatgtggattatttaagctcctaaattttgggatagtttgtaactcagtgattgataactaatacagatccttcactgcagatagtttgggaagcaataatttagagtgttcttggccaataaaaagatattcaaggcttaaagatgaattgacaaattcatattaagcatgactctgtgttggaaaataagaagagtagttatgccattgataataaactagatgatctactgatgcctcttcctgttccaagattgaagtatccagaatccaagcactgatatcccccattacatcagaaatgagtcaagtagcaagagctatttataataaatgtcatggccttttcctctattttaactgataacacattattttaagaattctcagtagattttagtaggagtgggtgtgacaacgtgcgtatgtatagaaaagaatatttttgttttaactctaaaagcaaagattatttttaggtcgcatccatacacgtacctgaagtaatggtattctgcttcctgaatgcctttctgaaaatgctgcctgcctttattgactcaaatgttgtcaagcgtgttacatacacatttttcctaaccaagggaagactcttgttcctaaataacttagtttttgggtggatcacttgcttccaaatacatttgataaaccaatgagcattgatgtgatatgacacaatagaaatgagtaattttaacttacaatgtaaaagtgaatcaagaacaaaaatctgagttttatttagagtgtgtcataagatacaaagaagatttgtagctttctttgatgtgctcacatgaaatgcctgtagtcaaacggctatttttaaacttgagaagaaattcaggacaaaaggaacattttaaatataaaagggaattcagggagatcacaaagaagtgaaatcactattacgaaagttcaaagacacattgttcttcaaatatcaagaagctgacttaaataccattggtgacccttattcaggggatactttctagggtttaaggaagtgacagacatgaggccattcttttgcccccttttcagaaactcttggttttggatcactattgtgtttaacttccttaagactaattctcctgttgtgctagacattttgaactcagtgagatctcaactgcaatataattggtatgctgtgtcagacatcaggtcggctgaccaccagagaccaggaagaggactctcatgtggcaatcccctgtctgggcaaagtgagtattgcatatcaggaatttgctcctacacggatgggaagctagaaaatttttctaaacgtaggcgggatgtcaggctattgccagatgtaaaggacagtcctaaaagccatccggaaggtcttatggatagatctcagtgggaacaggccatggaggctgaactagagaggagaggtctatagtcaaatgttagagaaaaagctctaacaaacaagaatggcaacttttacagagtaccaactctgcaaggcaatttcaatacgttagcatatttccttctcacagcaattttggaatataggttttatatccattatccacatgtggaaacagactcagagagatgaagtagtttaaccagtgatggagccagcattcaaatccatgactgtctcatgccaaatcctctttccactacattgtctttttgtttttttccttagtgagctcaacataaccaatgattaaaattaaaaaaaaatcagggatttcttttataatggatcttaagggcaccaagtacacatcctttatttaataagttaaaaaaagagaaagagaaagaaagttcacattagtacaagctatgattctgaattataaacttcagatactctgttggtcacataaataccacacccttagaaatcacaaagaatctgtttctgtgccaaaggaaaaaaaaaaggaaagaaacctacgcattagagaaatgtatttagctcagtacagcttttaattttcttttgataatgattttaagaaaaaactcatttctttttatttttcagctttattgaggtatgattgacaaataaaacttgtatataattaaggtatataacgtgatgttttaatatacattcatgtactgcataacaatcttttagtcaacaacagaccgcatatacaatggtgggctcctaagattacaatggagctgaaaaattcctattgtctagtaggcaaggcatcatagtgcaatgtgatactcacctgtttgtgttgatgccgatataaacaaacctgcggcattgccagtcatgtaaaagtatagcacacacaataacatacagtatataataataataaatgactattactggtttatgtatttgctggaggggcggggccctcagggacaacctcttgctaaggcaatgaagaagggaaatgtggggtcagagcccccacacaaagttcctactagggcactgcctagtggagccatgagaagtggaccacagtcctccagacctcaaaatgttagatccattaccagcttggattgtgtgcctggaaaagctgcagacactcaatgaccgcccatgaaagcagcagagatgggcgctggaccctgcaaagccacagcggtggagctgcccaagaccatggaaacccacctctcacatcagcgtgacctggatgtgacacatggagtcaaaggagatcactttagaactttaaagtttaatgactggtctattggattttggacttgtgtggggcctgtagcccctttgttttggccaatttctcccacttggaaaaggtgtattttacccaatgcctgtacccccattgtatctaggaagtaactaacttgcttttgattttacaggctcataggcaaaagggacttgccttatctcagatgagacttgggacttggacttttgagttaaagctaaaatgagttaagactttaggggactgttgggagggaaggcatgattggttttgaaatgtgaggacatgagatttgggaggggccaggaacagaatgatatgttttggctgtggctctacccaaatctcatcttgaattgtagttcccataatccccatgagtcatgggaggggaccttgtgagaagtaattgaatcatgaggggcgggcttttcctgtactgttcttgtaatagtgaataaagtctcacgagatctgatggttttataaagggaaattcacctgcacactctgtcttttctcccaccatgtaagacctgtcttcactcctccttccccttctgccatgattgtgagggcttcccagctacagggacttgtgagtccattaaacctctttttctttataaattatgcagtctcaggcacttctccatagcagtatgaaaatggactaatactctaatcaaaccgttttttcagaacatatccccatcattaagctattcatgactgtatatacgttgtgaagtgattcgtatgatcaagttaattagcatatccatcactgcacatagttactttttttggggggagagtatggtaagagatctactctcaaaaataagaaaaatcttttaactaaaacttatttgtactcagatattcaggctgttttaattgtccagtatttttgtttgtttgttttcaaaaaagtcatttcccaaaacattgcttaggttaatacttaaagttagtttaaatctgtagagaaaggcagttcgaaagtatgctatccttgcattaattcattcatccaaaaacatgcattaaataccttctatgtgccactgaataagaacacaaggtcctaaaaagtgtatcaaatgaaaaaacagtaacaaatatttatgcagaatataaagctatggagaaatgctagctttgaaagttcacaagacgaggttccctaaggctaatttgaggttcagaactggggaaaaccaacttattccggaaagatcttacagagcagctactttaggcagccaggttggaaatattattcctcttaatggctaatacatataaaacgctaactttattgtttgtgctttaaatcattccaaatcaagttgtaactcaggagaataaaattatctttctaaacaaacttttgtgatgctttttttgtctttgttactaacctgtcttttacatttaaataaaccatagcaaccacacctgcatctctcactgttgtccatgaagtggagattagtgaagtctggtaatgtttcactgtttactttaaagtcaccaaagtcatacttttcattctaaaagaaatgcaaatgatttttttttttttttgaggcagagtctcactctgtcaccaggctgaagtgcagtggcacgatctcagctcactgcaacctccgcctcccgggttcaagcgattctcctgcctcagcctcccaagtagctgggactacaggtgcacgccaccatgcccagctaatttttgtatttttaatagagacagggtttcaccatgttggccaggatggtctagatctcttgaccttgtgatccgcctgcctcagcctcccaaagtgctgggattatagacgtgagccactgtgcccggccaaacgatcgtatttttaaaggcaggtagagattcgtgttttgtttcttgcttattagtttttgcaaactttatatattactcaaaaattaagatctataaccacctagatatattgctgttctataaataaaaatttctgttgtccttgcaaactctaatttgaatgctaataatttatctctaattaattaactctaataaactactgatttcttccttcatgtagtgggttaagaaaaaatacgtctatgaaacttgcatgttgtaacaaaccatttcaagtattagaaaaaaatattatcttttgattcccacttgcaatccaaactattagaaaaatgtaacttagtgtaaaagataagtgtgtatccttccctgccactcatttgatcataaaaattttaatatttataggtaatatagcatcttaaaaaataaaactatagatatatataccttacattgttagtgggggtgatattactcccaagtgttgaaaactggttattggagggatgtatcttaggtgtcataatggtttgtgacactctaaaggactacaggacacaaacagatacacagtaaaactgtggtattaaaatataatgagaaggaggtgataaggaataaacatgtctaaaaaagctccttggggacaataacaaaaaaaaggttgtgaatacatatatatgtgtaagtgtatatacacacctttatgtacactattttttctttttaacgaaaacagaatatatggtactgtatattctgtctcttgcttttattatcattcaatacgctatgtcacatgtaaatcatagttgcatgcaaatcatttcagaggtaaggtaggtaacatcaacaagacaaacagggtttggggaagaatgtagaccatggcaaaactgtgagcccatgcttcttcatgaggaacatcagctcctttacatcagctccagctcatggttgctatgtgggaatttaggcccagtgttaccatattctctaatttttcaagcaatggaagtctaaatttttgtgtataatatgaattttgaatgttgacaataactttcccttgagggtcaacattatgtgggtcaagcaaaacaggtctggactagcacacaatgctggcttccttttggacttgtgaggtagaagttcaactcacgatttttcaaagaaatgttgacatactaactgcaacacaacctcctgcaacagaattcccacgtgatttgctcaagcctacggaatcagaaactctatgaatccacccagggatgtcactttttaacaaggagtgtcttatataatctcaaatttgagaaccaaccatatagcatactttttaacaggtatataatgataattgaattccaaactataagagtatcatactttgtcaaatccatttccttattggtggatactgaagttgctgccagattttttccttggtacctaatatttcaataaatgtcttcatgcaccattgcttttatttttgtagtatagatttcccaaatgaggattattggatataattttagggtctaatagatgttcattttaaagtctagtagacattgtaagcttaccttcaaaaggtttcaaaaagtcacattccaaccagcaatatacatgagtgcccttatcctaggatccaactctaagtatattagaaacttccttccaaattgatgagttaaaacattctttaaggcagggcgcggtggctcatgcctgtaatcctagcactttgggaggccaaggtgggcggatcacaaggtcaggatttgagaccagcctgaccaatatggtgaaaccccatctctactaaaaatacaaaaatcagctgggcatggtggcgggcacctgtactcccagctacttgggaggctgaggcaggagaatcacttgaacccaggaggtagaggttgcagtgagccgagatcgcgccactgcacttcagcctgggtgacagagcaagactctgtctcaaaataaataaataaataaataaataaataaataaataaataataaaaataaaaaaattctttattttttaagtgtacagtataatgtactgatttggggtgcagttaaaagtttttttttccacatttataagttgtttgcaattcctctacttgagggagtttacagatagtcaccagctgaaaatggcagtattgagagtgagagagtatacagctacatagtatcagtttccttgatacccttaccttcttcccaggctccaccctcctctcaaatttctgctactcctcacatacagtgttcctgaagccactgattatctttcaccctcctgtgaggactctatgttctcctttggaattattttcacttgttcattttcttggccaattttgctgtttaattttatatctttttcttatctatttgatgtaactgtgcaaactagatctttaacaatttgccttacatactgttttaatacaacaaattttaaaagttactgttttacttaatactctactcaattttgagcaaacttcatttgattttaattatagcaaccatttaaaacaagcagcgccattttagcttgttgcctttctgtaactgcttttagaaattcactttctttaacaacgtgcaatttcttcataatgccatagtaagttaactgtagagaagtcactaatgaatattattttactttattaaataacagcaagggaaatataaaaatttaaatagttttacatgcaacctaaaaactttccaaactcaaaaatggacttttttttggaggggggtagctttctctcaagaactcttatttcaaaatccaaatgggatttcaaaatacaagcaaataaatgtcaaagcctcttggcctctgctctgccattctatgcctgaaatcctgccaaaatgaaattttccgttcaaaagggctggcatttactaaactgatgttttaaagacattctcaaaaagtagtggaaactttgtccagctttttatgttcctgtcttgtagacagaacagctgcctttgcagatattttccaagatcttacattttctgaaaaacaaattttcagcccttccactgtcttcagcaagtgggtctattggtttttcccagtgccaagcagagaagataaacaactgccaaactagaagctagtgtctgagtatcaaggcatagaaaggacagaagagatagtgtttcagtaagtatcaatgcagagaaaggacagaagagaaagtgggagaaagaaaagagggtggttcaatcgttcacagtcaagagggacacatttatctcaaaattttaggctgtttcaacaaaaccgagctgtagcgagactagctgcttattcacacgagaacatcattttcagttactatgaagatcaaagagttaaaagatatgagttcgtttaaagaactcaaaagggaaaatatgaagccaccgcaatacgtagtaaaatctgaggcttaacagcgcagcgcctgagagtgccagtccactaaagggagggagaaggggcgcagagcttatgggggcctgggaaggagtgataagtctttggaaatggaaactaaagctatcagccagcgaaaaccatcaatattcctaaaaatatataatactaataatacataaaagctttaaaaaactaacaagacactgtgggatacaaaaaaaggtagaaatgaaaattacagaatgttaagtgaaaaaactgaaatccatctacagtcgaacagtttgcacctttaaaagcaatgacttgaagcagcaagcaaaagttcccagtccttaagactttctccccactctcaattctttctttcctctagtgcaaaagctgtctaagcagtgcacgccggaattatccccacgtgagccttcctttaatttcggtcttaatttttttctctcttgttattactcccagaccccaacctctttttcctcatctagtatctgtttcagggacaggacaaagaggaggcagcgagctgaaaaaagttttgtggtttgggatacttgggcctttgttgtgtcatttcctctacccctccacgcccccaaccacgtgaccaagaagggccggaattttgtgaatggagacgaaaggtggctgttggggcgggcgggactccgcccccttccctaaagcggccaatctcctagcggagcgctgaggggtcagcaataaacaacaatgggctggggatttacggctcgttattggctgcgggaagaacctcgccgggacctaacccgaagctccgccccctcgcggttaccctggatacccgtcaggctcgggctgcagagaaggtctttggaaactgttgctcagattacaggcgctgggttattccaggagtgcagggtggtggaggacccttgttattgaccccctgcttggttgcaccctcagatagtacccatgagcttcactgttcagcctcggggcccaggcgcttcctggaatctctccttggccggggttaaaatgcagttcccgctcaaaatgcttataggtgcgcgcgttgtgaactccgatttagtagtttccgggaatgcgcggggtctgtctttgctgtccatagttattggttgttttcccagtaataagtgttgattgtttgtttgtttgcttcttttttaagtagatctttctcctgcccaggtccggggttgagtgctgtgcgctcttacactccattttaatgtgtctccataacgttctatttaaggaaggaaactttcaaatagaaattgagaactgcagcacgtttcctaacgggcggaacagctgccggaaacgtcttttggtcactagttctggtcacaaatgaatttcaacagcattgagtccctggtcctatccccgcggcctcccgtccgctgttggacactggctccttaaagtgacgctttactgttctgagtcccataggaggatcagggcaagtggcttcagagatgcagccctcactgcttaacgtcctagttattgtccttgaaacccgagccatctcaccgctcgcccccaaccctgggctctggctgtttaaaagctggagaggaagtgaaagcgtcaagtacagtaagtgacaccctccgcctccgtgtatacataacaaaagctcaggaaacgtgcgggttctaggatatacgagcaaccccaagcactccctcctcctccccacagccacagtggactggaagtaccttttcccagtgcacacgtagggaccattttgacttatactttttcacctagcttgctctgttgtcctcccatcacaacctctgctaatcagcaattctgcatctcctaggtgccttccttatagattctttatgtttctgtcccacgaacgataggatctaattttagttgaggatgactgtttaaaaaatgtttcgataaaccataatggtgatggtgggttttgaaaaacgggaaaataaattgggccaaaagctgagtgggaatgaggatagagagggaggtgagctcctagtcagggcaagagtagaggggttggagatcctgaggggagggcagctgaataaggcggtacgggctttgtggatcgcggctctaagggtataccagaaccgcacaacagtactttaaggaaaccagcccaatagtggacctaacaccccaataatgggaactggcgactcgaaacacacggtttcagtatccccaggcgccttaacaataagcagcgggttacagaggaaatcgagtctctccgtggcgcttccaggctgaggacccagcgcctaccggccgagcaccccctagggcagaggggcgagggagacccgcgggaaggggcagcaagccgcctgattgacagcccgaaatctgatcttgtgaaagagacgcggagccaatgggaggcagcgatccatcagtttggattggaggcccctggaggagaagtagaggaaaaaccaccgaattgagctctgtcagaggcgctttcggcttccaagggggaagtgctgggctataattaatgtttttattaaatttggagggaagtttttgcagcctttcgcctagcgtggccttcaggtgggtctttccaacaactttttatgtctctccagataattgcatggttgtgggtcgcaaaaactatcctgatgaaagaggtgtctccgtctctttagtcccgttaggtgcaaagcaagtctcgttgatcgccattgctagttttgcacacgtttgcgaatcagagctgcccggggtacaccgaccgcgcagggaaacatcgagagtgtaaataaatacatcgcctcttgttcggatttttgctactaccgaaaatatgtaaattgtgaactctgttggctctctttggatccaggtgaaggaggcggtgtagggagggttattttgtgaatgggactgtcggagggtaattagctatgcaaattcaagagcttcattcatgatttttttttaagcctaaaagccatcttgttcccctctaggttgatagaagtccagatcctgaggaaatctccagctaaatgctcaaaatataaaaactgagctgagatttgcgaagagcagcagcatggatggattttatgaccagcaagtgccttacatggtcaccaatgtgagtgatcagtttgaaagttgctgtttataaacttgactccgtcgggggtggggagagggagaaaatgagaagggagggggcacgggggttgggattgcagatacttatctgctttgttgccactgtagggcgactctgcttctagaagcccagtcttcaaaatgagcttacctttcagtgatttggataaggcatagttttgtttttaagacccctttttctgattaaagtgcccaacatgagtggaagaggagatggagggcagcagcagctgctgcactcaaagtttttggctgggtttgtctgccacattgaaaagaatgaagttgagacaaatgctgacactttttgtttatatggggtgtttttgtttctttttttttttctcattttctcttttttttttttttcatttctctactctttttgcttttttttttgtgggggtggggtggggaggaggggctgtccaagagagaataaaacccactgttttaatctagcattgaaccagcctaaaaacaactttaagtgtaaatgcttcaggttgttttgatgctgagataccatgaatatatgattgataaatagtaatgtgctaagatcggcactgggaagcaactctccctgcctgcttagcataagctttcactgtcaaataagtgagaaaatgaatattagagttgatactatggacttctatttttctattcagagaagatccattagacttatgtatgcatgtctgtgtgtgtgtgtgtgcgcgcgcgtgtgcgtgtgtgtgatctgaggtttacattcttttaaaggattttatctttccctttgtagagtcagcgtgggagaaattgtaacgagaaaccaacaaatgtcaggaaaagaaaattcattaacagagatctggctcatgattcagaaggtgaggtttgattttgggctgaatccccatttttttacctacactctccaccctgctaaaagaaaaggagcacttcagtcttatcttaaaaataataaactttgaaattactgaatctaactaagactttaacttggaacgatttacataatgtggcagtttgcatgggagactattttatggtcctatcacaaagtaatgaaagaaggaaataaaaacttctcaatgacaaccttcttttaatcattgttttgtgtttaaatacctttgtccatggggcatataactcaccccattcactaagataacaatttaaaaatatccaatacagtgggacaaattcagcagctatgtacactgcttacttttttctttctcctttattacaagttaaacagtattagtgattgtttggtttcccacctcctttacactaaaaccatctactattaacagaattttcaagggtgattttgatgactaaattgtgaggtcataataccttgtttatcgaccataatgtgttcactgaatcatacttaaggcctccttaataattataatactatttgggaaattagtttgcagattctttttatgaactgttgctaggatgtcagtatgttataaattattttagccatatgaggacattcataataaacttcatatgcttagatttaattatcaaagtttagttggcaattttaattagatatactgaattctgaaacttcctcaaatcttcatactatttaaatacctccctccctccctccctaatatgaccatatagtttagaacttgatgagaacctggtgccaaagaattatctttctgacttttataaacctattaatgtagaaattttcctctaaaaagttgtatttgaagtggtttcttttagtttcgaggtattgaagttgaaaacataatactttgacagttgtaccatgtaccattatatattttacgtaagattcagaagatataaataaaatgcttttcagtctttctaatcttccccctactactattttagcaagagttaaatatatttaaggaagatttcagtgaacagacacatattcacctcagcctttttgtgaattctggtatccctgagcttatttattaagctgtttgttaaaaagaagaaaagatgattgactttattctttagttgactaaaataatttcttaaagagttgcttaataggcatgaaaagtaggcagtattattgagatatttaagttatgcctctttttttatttttatgttgactgcgtctcttgaaattaaatttatatttaataccaatttcatgacaaatatttccatttaatgaagactaaagatttgcaaatcttatgtttatgtctttgacttgttttttagaactctttcaagatctaagtcaattacaggaaacatggcttgcagaaggtaaggcaaaatttgctttaaaaggggggaaagcaactctagaaggagaaagaaaagaagtcctgaacttgctgtcttaatattcagcccaattaattgagctctaaaagagccacctcatgtgtcatgcatacattagagcctctgatgagtttgtctttggggactctggggctgtactacccagtgtcatcacaaattaccaggagaaattgcttccagctcacaatcacatctgcttttggcaagaactaatgcaccaagacttcaagttctaagcctctgttcagattttaattgcaattgatcaggtttatattattgtacctccagagacctcctagagccagaacccggctggcttgctgtttcctttagagcagcgcatatcattatttggtgttctggtggaggacttttctgatggcagaaattagtttctctgggttcatcaggacgggatgcttcaagatttaagtgcaagtgtcttctttcctccttgttcacaacacagaacgttaggtgtgtatctaatacttaggaaatctatgggtttaaaataaatgggagatatgaggattttaaaaatgttttccatgtgttactattcatgttatgtttgttgaaattgacctttgctattttgtcagttttattaggatttatttaatagagcaaggatacatttaaaggcattactttcattttgaattattttttgttaaaattttgtggtgcaatctgttatatcttttatcgtatgcaactttataggaaaatgagattgcctcataaagctttatacaacttcaaaaatgcctaatgttgagggacttctgttggcattcatactttgaaatttttcttttggatttggcatacaaatgtgaaacgttaattttatggtgtggtttgtgggaaatacaaagagaaaaattatagatacttaagcattgagtgtataacagtattatttgtgtgttcacattatatgggaaacatgcaaattttggaacagattttaagatggttaaaaaggagagagtgggtctctttaaatggaacccaggtgttactgtagctactttgaggcagactgacgtgttttatcggtggtcttgaatgcagttgatcaagttgctgttagcatgtaaaataagtttctttgttttgctgatagtctagttctccaaagagctttttcaatctttatcaatctttaaagttaaatagctttcctaatagtcctttgaaaggatgattgtatttatatgttaatgaaggtaagacttactgaaagttttggctatatttaaggatcattttgctagtctgtgtaaatgaaacttactgcaatacattactttttattgcaacataagtcatattcagatataagtttttcaaggaaaatttgcatggagattcttgtattaacttatgcctattagttttgcaaagtcaaaggttgtgagaacattacctttatgagagaatttatttgcttctccaaaataacttaaaatatctattttaattgttctggaaggtttgttggttcttagatgtttaaatctcattgattccaagtcagtgcacttgctggcagattttgaatgtgcatagcaactctgttcctggaattttaaaatgtggaatctgtgacagactcttaccattttataatcagtttcagtacttttttttttttttaacttttgacttgttttgtgtcttgtagctcagataagtgattgcaataatttatccaaatttatcttttaaaactctgcagagaatagtctttctccgggattattaacatacctgtaaatcaaacctgaagatttagcactacaaaaaataaacctagaaaatgatcaatgtatttggaagaacatggacctttacttagaaaagaattataatttcaattaagttcaggaattaatcatgagtgttttatatgaattcccaggtggactactatttacaaactatggataagatttcattttagaataatttaagcattttcaaaacagtttacgttaatttatctaatcacgatgtaagtaaaaagttgttaatgtgatgtttaaaacctaatagtgagaaaagagatctttttaacttcttgtttctagactccactttttttttgttttgagaaattaaatatattattttgcactgatattttaacttgacttatcccacctcttgaacggtattagctaagaagagatccccaaattaccctagtttatttgtagtgagatgtgtccatttatgtctttctggacatccagaaattaaaacattgccaaattggcagaccatgaaccgtttacatatttcttttcataatgctccatagccaagaaagtgaccatggaattttaagacatcttgacccttttaaaaaagatcattggcagttaatcaagtttctcccatgagttagaattccactgggaagttaaacaggtctaaaaaccttattagacataagagtcaagttagttgtcatatgtcatatgataattgtgtttttgaaaaattataaaagtcctcaaatatttgtgaaatgatatcttagcatgtttagtttgtttttttctgtaagactattcataaattttaccccaaatgcaacatatggattagtcatgggtaattattatggattataaaatttcttttatttctaaggggaagttggaatagataaggcaggactgtttgagggttgggatgggaccagtattttcagttcagtaaagtcctctgtaaaaatatacttgcattctaccaagaaagttaattcccatacagagatttaaatatgttggtggagaatataactttacattaatatcatttcccaagaaataacactgcaatttaaaggttttttttttaacatctaaacacagtttaaaacaattatcttattctgaagaaaactgcaaagttaatgttttcagtaaccacagtagttaaaaaaaaaaaaagtcagggaatatgccaattttaaaatgttgccatagtcactttatgttataattttactatgtgcaattctttattgattctttgtcttttaaattagactgctactgacagaaaggcaattgcaattatttgatcccatgaaataatgagtttaaatatcaattctatcaacatcatggtgatgtcttattcttaacaacctgaaagtcatagttaaaatggaacctcttgtgtatccagaacaaaaatagaaagatgtaaaaaattaagacaggattgtattcttccaaatttgcttcttaaagctcacctactaacacaacttaaagggaaataataattttcagtatatatctgatgtaaatgtgtagctgctctcttgactgttattttgtttccggtctagatgttctttcaggttcactttcatcaacaatattctctgtcttcagggtaaaatgttttccagtggttttgtattgagtcaagtttagtgctgcctccacacttcgagtaggagttttatctgcaagaacaacctttctacagcaaagcttattacatcatacgaataagggttttttccttttggttttatgtgaccttcaaacaacagtcaggtcaacttaaaagcagagatgtcattactttcccctcaattcgctttaatggctgatggtaaatttatattcaaaatcataagtaatatgtgctattgttactcactatgtgtaatgtcatccacaatatacagtagtcataatacactcatttttatttttcagaaatcctactttttttcaatggaacataaaattggttatgtgctcatgaattattttcccccacttggtgcaataaggattaaaggctttaaaaatgacattattttatgtggtttacataaaacatgaatttagaattaagcattgaattacagaactccatataatctcttataattgaacaacaataatttcatgtgtgtgtgggcggggagaggatgggctatcacccctctttttgatgtgctagaaaataatctaaaatatgagagaaagacttcccatttgagtttgacttaaagacagcagataaagtatattttatttctaaacattcattggaattgcataaatgttttttcatccatgttttatttacaaaatagaaattttttttaaaaatagaaaaataggatttggtgtagtatagtgtagtttttccagaggatcctaataaataaaatattgctaagcttttctatttcagttataggaaatgtgcagtttgttacattttgtagtataactttattccctttgatttgtgtataatgttataataaaaaataataatagagtcagacctctgtagcattagagaaaatatttggctagaaacaacggctagttggctctgagcttcccttaagttttcaagttactgcaggtcagttttagttaggaattgaagctgatttgacacaacgactaaaactttactgttacagtaagaatatagaaatatggaaataatgccttgatcaagtattaaagatgttttgtcattggaaagttgcctcctttttgtatgtttaaatatgtttatacttctgcataattaatgcttttacatttgtacaatcattttaatgttaaaagtggatgtggtataaaaccaagcttagtggactcatgattattttgttccatggcctgtagcttcaatttaggattaaacagcataccactgtaggaaggtggatttttctttttttacttcttatttgaaataaaatttaaatttctcatgagaaatttgtttctaactctttgattcaaagagaaatgctacaaagttcagcaaacaatctacagtattcttatgataaaaatagttggataataggcaagaaaaataaggcatttccgtaatggtttttcttttccctttcttgaaaccttctttgcatctttctgtcttttccttttttcttccttagttttatacatgcaagtttctgtaacaagttactctgtaaagcaggatgcatgtatgtatttgtgtgtgtgtgtatatatatatatatgtatgtatgtatgtatgtatgtatgtatgtaactttctaaacgtcatttatttaaatgtgtttctttaatggatctgagctctgagacagagcaataaaattggtgtgtttatattgcaagtccaagtttacttgctttagctccctggaagggtgtgacatgaaaagattgtggttgggccacatggctcatatgctggactgtgtttttgtgaatggaggcagaactccagttctgcctgcttgtcttgaggaattgctgaggagatcagctgtctcattcacgggcagaaagaatgactcatacatcttccgccttgtttggctccaggtcattgttacagtggatagaactggttttaattaaatattaaccccttttatacttgacgtttgttttatttgtaattcttccactttttccttagctttaaaaaaaaacccaacaggcacatagtttgtaagaataggggggttttcgcttccctgcagccaaccttggaaactttttcatcgcttactttttcttaagtaatgattattatttcatttgaaagttaaaaataagcataacataaaggcaagctatatttaaaattacccatctctaaggcaatattagttaagaaaagtattaaaattaaaaaggagaattggtgagtttgtgacatataggtcatgattaatatttttatgaatttctttctgataatatgcattgatacgtagcaaaaagacagaaaacagtaaaacaactttggataataatctaggtaaaacaaatagctgagagtgcagatactgcccttttaaagccgacatcctgagacttgatggcaactggtctattaacgtgcaatgaactgatagagccgctccagctattaccaataaaatccacatgcttaatctccttgaaagcattttattggtcttttggtatatactttctccccttctcctttcctcctcttccccttcgtctttaattacatagtgtggggaaacattttcattccccaaaggtgattatatccagcacagtttataatagatagtagtggaaaaaacattgcttttttaggctgacctctattgttaattttcaactttggagttggtatggcttgctgcaagttttcaggcagctgcagtttgctccttcacagtattcccctgaattgaagaaaaaaggaaatgtatgatacaagtgtggcaatactttgtcatattttccttgcctagatccaacttgtgtttttagttaactgctttccgtttactctaacttgaaattagaggtatacttaagcctttgtctatttaagtagcatgctgcttcgtttggtctattcagtttcttaagattagcttctgtgaaaatgtgagtcatatgttttttgttaaaattctgtaatatgttcaggaataagtgtgaagtatttattcagtatgttaaggagttagaacagaaataggaattcttattcttactctttacagattgttatcgtgcagctattttctgtatatttgcgaggtataacttctagattattctactcctaaaatttggcccttttttcctcacacatattccagcacacatcacacaccaatcagtgagtctgtgctgctcttgcagtgacatatattaggaagttgcaaatctgcttacgatgctacaaaaacaaacaaaagacctttaggacattcataccatcatattcagttacaagtatacttttgttactcaccagctatttttaacttttcctgtaaagggatattatatttttattagattcttataaatgttggctttttaaaagcccagtaattgttgtggttgatatatttgcatctcaatagttatatctgtttagctgttaattctgagggaaaaccaaaacaacgatataatgggaaaaatgtgcaggatttgaatctgtgtacttgctgttatttattaaatatatatttaaaacacttgtaatttttttgatatgaagacttacttgaaagcacacccttcgccttgtaatttatgaatcttttagaacatttttttctgcagtgtcaaaaaaatatgttgtgttaatagctgagagaatgctaatgtacagattttagctgtttcgttgcctctctagtagacttcattagaagtaaagatattaaactgagcgttgtaatgacatgtacttttttgtggatgacttgaaagacaagggttggtgggtagaggactggaaagaagaaaataaggaacatttcttgagtagctggcattgcgtttagactgtttcatttaatcctcaccaaaaaactgtattttcactagtaaactgataagtaaaattcagttctaagaggttcagaaacttaaccaaagttgcacaactagcatgtcacagaattaagatttgcagtttgctaactttgaagttgttacccacagtatcagatattggagcaatatgaagagaaaaaaattctccttgcaatataggctgatcaaataggtatcagttaaaacttgaaaaaattattaatttgtttgattttgtttggtagcgggggtagagtgcattggtaataaggttaattattggtgtacagaagagagttgttagaaaacagttgaatgtcaaactgcatacatttttataacaggcacaattatcagattcttatgctcttcataatataacgtaaattttattcagccaaatgtctgtttttaaagaataatattaaactaataaaaagaaactttaattctgtatattgtattattttttatataaaatttttttaaaatgtagaattcctttttatgtagatttttttcttaagccattcagttaccaacctgaagcattttcaaaagagactgtttattttaataagcattcctcatgcagaataggctcatttaagaaagttaattaacatctatttaaatatgacttggctggataaaaaagtttcagtattatgtaacactaataaagtaatactacctagtcaaatgacagctaaagttaattaggatgataattcattatatttttatcaaattaaaagtaacctaacttctattttttgggcgtgtgtgtgtgtgtgtgttttgcatgtatttatgtgtgtttgtgaaagcttattactaatattcagtttggaataggttacttcgatgtctaaatcaactgtgatgaaaacattttagaagtgaaaaatgcacttgtgttttgattgctgccaaatgcattaagtccttgctattcagtatttttccttgactaaaaataggaacgtcttttgacatgaggactgacgaactagtgatattctttttgttaatgcctagtagttgccaggaaaatattttgaatgaaaagatgacatttgtgttattgtttgttattttgttaatgtgaatataatctttgaaatataatactttattatatatgagccaaatcaaggaccattcttccatttaaaaacctttgtagcatactttggcaaaattcagtgcaagcatcttaaaatatggtgtattttgcaggacagagaacataccagcagacgtttctaaaaaagcagagagacgtgtgtgataactgcacatcacttaaaataattgtgtggttaatttaagtgggctgcttacacactggcagtgggtgaattgaaatagcttttgctctattcttgaaaaaaaactgcaggaaatggaaattctatagctttctttattttgcatctcttttatttccatctggcaggtgaaattcggagggaatacacctgccatcatcctatttctgacatatatatggttcctaggtgacatcaatgatccccttccatttctcctcctaagtagtgttgtcaataccattttaaataggagctcattggcaaataatcataggtttgatctcagcccaagaagatcttacttgacagattttacttgacattccttatgcttttggcagtttctctcttaatttttttttaattttctttttcttcttcagctcaggtacctgacaatgatgagcagtttgtaccagactatcaggctgaaagttgtaagtatagtatgactcatctcttgtatttttctgtctttctcatttccttctttcttctttctctttggttggttttcacgtccagtgtcttgtcttacattgtaccagcgcctttttaacttacagccataagatgatttgatttgttaggttgtgacatcagcagaaactctgttttgagcagaatgcttgaattctgtatatcggaagagaactccaaatagtaggcaaggaagactgagttgattgaaagatggtcttgttcttcatattggtaaatatctttgggaggaaatagcatgtgatccatgaacatgcacatgtttacttccagtttgccaatatgcttacagagaaatgcctggatgctgatgggaggtagagttaaaaactacttgagattagttattgtataatttataaaagattctggaccaaacattcattggcttattgtagtattgtacattcatgaattgtcacctgcttttatttaatttttagcctgaaattttctgcttcctggttgcagtagcacaaatggaagcagccattggcttctctcagggttcttccttctgcgttcctttccctaagccttgctcctgggtctgtcagagaatgcgcaaggagtgatgcatggagtactcactgtcccttaattgcagagtgagcgttttgcctgtacaaacgtggttgccttggggtttactgctgatatttataatctgccattctaccagctaactgctgctactgaccaaaggagcaaatactaaggaaaagggtataaatgccatcttaattatgaaactggcctaatgcatttttgttctgttggtgacatctaaatttgttttattttttctaatacagatacctgcattacttcaagtaacagatgttgtgggcagtgttttcagcatttatgtttgatatgttaaatttctcaggcgtagagggttgtgcaaggttttgtccagattctctaacatgttacatgtttcaactcagcttggttataaagaaattactgtggtaaaatatacataccacaaaatttaccatttcaactatttttaagtttgtagttcaatggcactaagtacattcacattgttgtacaaccttcaccactattcaacttcagaacttttttgtatcccaagctgaagttctgtacctgtaaaacaataactcccatttctctgccctcagtccctggtaaccactgttgtattagctttatttttgatccgagaagaaaactgtataatgctgtttgatgtctaaatacaggtaattgacataggctttcaagaaacttactcagcaactatatagaccttaattagacacccttagaaacactcccagaaggatgatggctaatacaagtcctccccttcttgattaaagtatgggaagagaatgtcatattgccaacatttcccttcctatgggcaattgaattcttctttctaaaagctaaacacgtcgtctgagtaaaagaattaatctcgttgatattttacatccaaagtaattggtaacaattccaatactataccaattgtcagggtaaaatgaaccacctataggtaattttttactccttttcttatttgacctcttttcagcttttcttattgaatatttagtctctttgaactcttttctgaaggtcacactggcgtgattttcttcctttatttttttttgttttttactcccttgaccactccttcttactcaactcatcttccttccctcctctttgtggacctcttctttccctagggttctgtcccgaaacctttcctttttttttttcttttcttttctttttttttttttttttgagacagagtctcaccctgttgcccaggctctagtgcagtggtgcaatcttggctcactgcaagctccacctcccgggttcacaccattctcctgcctcagccattctcctgcctcagcctcccgagtagctgggactacaggcatccgccatcactcccagctaattttttgtctttttagtagagttggggtttcactgtgttggccaggatggtctcgatctcctgacctcgtgatccgcccgccttggcctcccaaagtgctgggatcacaggtgtgagcccctttcctcttattttacatgcaccatgccagcactgtcccatagaactttctgtgatggaaatgactacacctgtgccacctgatacagtgtccactaaccacattggccattgagcacacgaaatgtggttagtgggactgaggaaatgaatttttaactttatttaattttgattattttaaatttagacatgtctggatactggctactggctactgtattggtcagcacagctttgaacagcgatgtcttccacattgttgtctccagcctggttcttccctccgaagctgtccattggacatcctcacctgatccctgctagtgtccctgtgcagattagaaaaaggcaacacctctggacttgctcccttagcccttggctgtgcattgcacaaaacaccatctacacgccaactccaatctttaacgcaacactccacagacaatttacactcagcaagtccaacagtgaaatcatgatttttcctgaccaacgttgctcttttacttctgttgcctttctaagttactggcatcaccatccaaactgaaatcctgatatttatccttagagacctcggttctttacaataaacctcaaattgctaaccaagttgttgatcctagctttcaaaaatatcttaatttcatggcctctccttcatccctatttcattgttttagttcacacacctacattctgccttgactgaacttctgagtcagccttttggttggttttcttgtcttttgattttccctctttgcaagccaccctgtgcaatagcattaacacacagctatttggccttgttacttttcttcttaaactgtctgcaggacagagtcctatttctttagctgtacggaaaattcttctacaaccgaagccttgactgtcctttcggtttaaactcttgctactccagtgccctgacttttcctttcctctgtactttagcccttctaatttttcagttatctgggcagattgagctgttttaaatctctttgcccttgcatgtgttcattttgctttaaaacttttcatttttgttttgcaatctggtgaacctcctatttcagactcagcttagatttcacctcactgaagtctttctcagccttttcttgccaccctgaccccacagagttagctggactccacagcatcttgtatattatatttattgtattatagtattttagatacatttgtgtctttgacaagattgtgaacttcttgagggtacaagaaacacgtcacattcagcatggcttacatgttatagaagaacaataagtaaaattatcattgcattcatgatcaccttcttagtgcttatttcctcctaagcatcttcagagtcttaattcgtttcttaaggtagaaacatgatatgccttaaaactgcacgtatagtctcattctgggaaaacttgctgaaactatgaaagtttaaccaaatattttcagaattgtgaaggtttattttactttaattagagaatatttacagtttaacaaatatggctttgggacatgtaaataagacacacaataatttaaaaaaacccataaacagaggcaaaaataagtctgaaatcgcctaatttaaaaaaaaaagtggaaggatatgttatttcaggttttcacagacatgaaggactattgttcagatcataataaccagctaattttattcttcaccgaagaaaggacaagagggaaatgatttaaaaagaagaatagggcatttgtattagatactaaagaggatttctggatgcagaagtttatcaaatattggaattgagaggttagatggtctccaaaatgcctttaagcagatgtttgattctcgtgcgtctgggtatgcttagtgggggcagagggatctatctctagaaagagaaagaaactgcatcccctctgtgtggcctgtctgtaaattctatggggatatttttaaaaatgtgagtaatcaggtttccttgcatacctcaatgaaatcagatgcttctgccttagcttttactgctttagtcctttggtaaatgaaggttaagagagtgaagagcaaaattttgctcaatactggattatagaacatgcatttgactgtaacatgtttaaatgcatgtagaataatagagatcagagcatccaaaaattgtgaaaatgagattaaatcacaacacttgagaactttctaaaaatttccctgagcattgtttgttgctgtttacaaaatattttaattggaaatgtggaatccagtgatggtatattatagattgctaacctttgaaggatgctaactttgaagcaagtataggcattaaaaataagtgaaaacagagcctgggcatggtggctcatgcctataatcctggcactttggaaggctgaagtggagaattgcttgagctcgggagttggagaccagcctgggcaacataatgagaccctgtatctatcagaaaataaaaataaaaaccaagtgaaaacaagttcctacaagtgcatgccaggaaatcgatgaaggctaagagaaacaataacatgcttttaacaaattgtttattccttagcaataaatcttttcatatctcagacactctgttggaaaaaatagaattacgttaggatgtgcttaatccagaagaaatagaagtgtatcttctcaaaaaggacaaattaaggagtatttcaaacataggtgaaccttatgtttctgaagtggatatacatttgtatttaaacagaattttcctaaattgtttactttaagtttaattacatcaataatgttatattttcaatcttattttattctgagacagggtctcacttggttgccctggctagagtgcagtggcatgattttggctcactgcaaactctgcctccttagttcagcagtctaccctacttcagcctcccaagtagctgggactacaggcacgcaccaccatgcccggccaatttttgtattttatagagagatggggttttgcccaggctggtcttgaactcctgggcttaagtgatctgctcaagtcggcctcctgaagtgctaggattgcaggcatgagccatcatacccagccttaaatcatatattttaaatttagttatatcattttttttttctttttgagacagagtctcgctgtatcatctaggctggagtgcagtggcacgatctcggctcactgcaaatcctgcctcccggattcaagtgtctcttgcctcagcctcctaggtagctgggattacaggcatgcgctaccatgcctggataatttttgtatttttagtggagacggagtttcactattgttgtccaggctagtctcaaactcctgacttcaagtgatccgcccgccttagcttcccaaagtgctgggattacaggtgtgagccactgtgcctggccgttatatcattcatctttgaaaatctaccacctttcattttgttcttcgtaacaaagttatgtgttatttttagaactagtttgtttccatttggttacattagttcatttcagtcttttctctgtagtgattcacatgatagtgactttcacatttacattttatcttcttccagagcatttccaggagtgtgcataagtcccagggttatgcaaaattcccaacagaatagatccttgtaactctactgctttgtcttacactcagtaaaacacactggaatgcaagtccattggaaaaaatgttattaaagaaataacaataaccctgactcttcactatttacaaaagtaaatcttttgcaaacttctgtactttatcagatatctgtaatacaatactagaggaccatacaaaaatcatccagacagacccttgtgtggggactcaactgtttaaaaccactaatattattacatggatggcactttaagtaaatgaaaatcataactacactttgtttctttaagaatttctggttttaagaatagcatttgggtcgggcacattggctcacgcctgtagtcccagcactttgggaggccgaggcaggcggatcacctaaggtcaggagttcgagactagcctggctaacatggcgaaaccccgtctctactaaaactacaaaattatctgggtgtggtgtcacatgcctgtaatcccagctactcaggaggctgaggcaggagaattgcttgaacctgggaggtagaggttgccgtgagccaagatcgtgccatcgcactccagcctgggtgacagagtaagattctgtctcaaaaaataaataaataaaataaaataaataaaagaaagaatagcatttgacttttttttttcaatgaagtggaaaaaagaaatacttagattactgttacaaatctgcttttaaaaaaactgaagtcagtcaggtctgtgtagaccctgactgaataatttgtgttaacacgtacctgtccaggatcagaaaaattccatttgtggtttgttttcataatttcctgcctttttactaagttaccttcctacatcttgtttctttcaacacatacagtgagtactttataaagttgattttttattactaattttgaaaactttcttgcccgattaagtttttttgatatgattggtcaggaaaacttcatcttctttcgtttttctgactgcttttaccaaaatgagagcacacactgaaagagaaatggcatttttttggatttaagaacatgagttttttggtttgttttcaatttcaaaaagatttaaaactttttttgaggcatatttaaacatgttaccaaatagactcaaactatccatttcaagcatgactagttgcataccttctcgcccaagttagtattcctgagagttatacgatagctacctcttgatggttctgagtttcttttgggtatgctttttgtagttgctgctttgtgtgtgtgtgtgtgtgtgtgtgtgtgtgtgtgtgtgtgtgttttgagatggggtctcgctttgtcgcccaggctggagtgcagtggcgtgacctcagctcactgcaagctccgcctcccgggttcacgccattctcctgcctcggcctcccggctagctgggaccacaggcgcccgccaccacgccaggctaatttttttttttgtatttttagtagagacggggtttcactgtgttagccagtatggtctccatctcctgtcctcgtgattctcctgcctcggcctcccaaagtgctgggattacaggcgtgagccactgcgcctggcccagtttaaatattttgtcaaagcagtttatgtacagagtaggaaaaagtgcaaataaaattattccccgttcctgcaacccacaactcacagtcctctctagaagcaactgccttttagttgtcctacatactaaataatatgcttgtactgcaacttcttgttttattagttttagattttacctgttgtcctatgaagatagaaaaacattttggataggttttaattactttaatgccggtaatcagctgtctgattctacttcagtccgtattcagacctgggcatgaataaaaatcatttgggaagcttgtgcaaatgcagcttcctgtttcctatcctgtgagagcttgacattacaggcctagaactaggcttctgtatctctaaggaactgttaggtgattctgatgcaggcctttcgtggagtgcaaggttagatattttctcatatacttaattgtaaaataaagacagcagtatcagtcttttgcaattaagttgtaagatgaaccttgccattcatacccatataaaatttgttatgtgatagaggcaatcagtttctggaaaatattatttaagtaatatattgtcatcttatttttaaaatatactagggaatcaaaaagcgaaggctatataaaaatgatattttaaatatattcttattttatcatctttgctagaattatatatattttcctcttccaaagattattctctattttagctgtgagaaagtcattgctgattgtagatttctgttatactggaaccaattctagtttagaaggaacttcccaatgctgattagagagagccaaggcattgatgacccaccctgttctaggtgtgtctagtaggaattcttgtcattagatgttctactgttccactggtgcagatgtgttccatgtctgtcacaaagcccagcagccccctttccagtaaagcgaaaattttagtttagtacttgattgttttacaaggaatacattttttaaatcaaaatgaagatccaatgaaaagtactctccatcttgcaagtaggctctcttgcaagaatttttattttagataccctcccaggaatccatcaagtccagtaaaagaaataaaatctaaatcatagaccttgggtatgtctcttaacctttacttacttatctgtaagttgacagggaaacaaatcttttaggcccagagccacattatgattttgtgccagaaggaaaagagaaaggatactagctaaatctggtgaatgcatgcttgacttgaaaagtgggttttagaaaaaaacgtaattcatgggggaataatgtaagtagaatttgctatgaaggacactttcccttataggaagtaggtgtactttcttttattggtatacttataattttctcactgtaagtatacggaatataagtattggacaggtgcagccaatacttatattctgtatacttacagtgagaaaattacattagtcttgattttagtaaagtatgctctagtagatacttttcactatttttggttttaccagtttattcttgttaaggtacatagggcaggcttaccgcccagatgaaaaccaaaaactaaaattcaaaactctacaaaactggtgcttgctcttccaaagatgaaagctaaaaatatatatattaacccaagtctttagctttttctttcctatttttcttctttaattttgtccttaatataacaatatattgtagaaattgacttttgaaatgtgctcaaaggaagttatgtcagcaaatattttttacttaccctccctataattagtcacaagttattttgaagaaagtgatctataccttctttggttgaacttgacctcatattaaataattattttgttatacaatgaatggacttgatagaaatataagccaagcaatatttattggaaaaatctaggtaaaggatgtcagtggaaaatatttgcagaaccaaatattatactttttgtccccatatttttaataaatacacatacatctatatattctgatatgtaaaaaagtaaacacaacaattattagtatttgaaactaaaataaagcagtcatgaaaataaatatatttgggggctaccacctcatagaatatgtaagtttcatgaaataagatataaagaagaaataacctgagctaaactagtacatgtggaccttcacatcgtaattgtatgcttagtgtttgttatgggtttttattggtatcatttttccactttttttaaatcataataaacatctatttaagatgcacaatgcatatttgcttctgtctgttactgaattttttcctaatgagagttggtgctgtatcttactaggtaaaaattttggttagatgctattgtttttttaaatctaaagcactatttgcatttgacagtagctaagggtaatgttaactcaagaactccattattggcaatatatcaggaatggctagattaaaaatactgtttaaacaatgtctgattaagctttaagatcagaaaagtacctttgtgcaatggttttgtatgtaatcttttgaatcttttgtaaatctagagtttagcaaagaagtttttttggtttgttttgctgtgggtatgacattattaaactattcagagatttgtttcatagttactcctagttattgcctatatagtcctgttttgactagtttttaggtcctgttgaagaggcttgagttgtgatggaccctttaattatcttttattgtagcagaatcttgtattcacatttctgtttgcaaaattggaatgattatattttgcaaatgagatccgtatccattactgttattttttatgatttttaaatatgaataataaatcttaatgtataacagttcttattttacctatgagagtttagtttaattaatttatttattgggtacatatgctacacagttgtagtctgtacaggtgttacgtaggtttataagactctagatgtttattcattcaacaaatgtgttttgagtccctattatatgacaggctttgtcctagtcactggagatacagtggtgaaaaaagtcagaaaaatatctgctatcatggagcttatgttcttactgcatataattgataaatgaagttgtatttatcacatattgagtaatgtgaaattatatgagtgatgtgaaatctatgcataatcactgtgtattcagactctgatctattacatattgaagaaaatgtgcttaggtttcatgtaattttaggtttttttgtttgtttgtttgtttttgtttttgagacagggtctcactctgtcgcccagtctggagtgcagtggaatgatctcagctcactgcagcctcagtctcctgggctcaagtgacctcaatctcctgggctcagatgactctcccatctcagcctgagaccataggcatgcaccaccatccccagctaatttttgtatttttttgtagagatggggttttgccatgttgcccatgctggtcttgaactcctgagaccaagcaatcctcccgccttggccccctactgtgctgggattacaggtgtgagccaccacacccggacttaattttatacttattttaacaaaatgtactctgtccaaaggcaaggccactggattccctagtggatgatggctatcagtgtctgtcttaacaccttgttgacctatgctaaaattcatgttataggggactgacaagaatatctttggacttttaaaaaatgaggtactctactgttaagtattactatttacagagtattgtcctattcattgagatcatatttgttctttaagattcagatcagatgttatttttcccttgattatcttagtcagaattaacaaattttatgtgccaatacatactttacatagatcctaattttaatcctattttcattggcttgtagaggatggttcatgcccggtttatgtgtatgattcacatgtttgaggtattcattgaatactgaattgaatgaatagtttcttgggtatttagaatcttattttttaaaaaacgtattcatgcacaggtggcttgaattgtttgaaaacgagtgccaatatctgcttttatttccctctgttttatttttctttgagggctaatggaaagctgtttgcatttatgtaacattagagctaaatctcagttatcagattagggcactctaataaatattattagatactcctatctcaccacacatttctcaataatctctattaggacaaatactctgaaataacttgatattattcctgttttacatgaagagaaacccagggcataaaataatcaaatagctaaggcatgtgatgactgaaattacacagctgagaatcccatctcatggttgcttagtctatgcagatcttccctccctgatagccaatactcagactacacgtacaagcttcaaaactgtttctattctgaaaaaaaaaaatctgcgtggctaacaaagaatgtgtttcactaatagtttttgaaaattattctcatcaaggtatgatagatgaagagagaccaagagcaccttccaatagaggtttgtctcaagaaagatgttctgtgaactcatctgagcgaatagctgtgagaaaaatagatgggaggacatggtgttcgggaactattccagtccttgtctaggctgcagtgtgtgcgcttctctgcctcaaatattttctcttatttaccagaattcaagagatgtttatgataacactgtgtatttatgcgttgtttatgcacaggttttggccccagaatgtttcagacatggtgtatttttctcactggaggagaacagccatttgggaatggaggcagtagtagtagtagcagcagcggcggaggtattagtagtagtagtaggagtattactaatgttcatggaattcccattatagtagtaaatattcatagaaatttcaaagctgcagcttgagacgataaagattaatgatatcaacacctttaatttaaagatgaaaaactgaaacccaaaaagattatcaggctcttcatgattttaaaagaaagattgtacacccttagctgtgtgttgggaaaatagcaaataagaaaaagtatgaacctggatgctttcactcattagtgatttttttctttatcagattcactataagatacttattccagtatcttattccagatactggaataagaaatacttttctcacccattttgttattcagaagggtatttttaaattctgctacatcactagcacaaatgtatatttgttggatgaaggaatgacttcaattcaatatttttatgccaggttttgtctcgtttatcaatgttaatgtatctatgcataattcttagcttagtattatgtcgatttttcacattaagtatgatcgtgatctataaaccaataccaagttctggataaattttgattagaaatatgtgcccccctttttccatttatcccccagaacttttcaacactgaatttagtcctaaaccataagatgtttttcttagaattatttccagctgcagagttaccagcaaaagttgttgtcaaatactatcaaggccaccgaacatggttaaaaatggctcatccctataaagatgtatgggtagtattgaagcaaacctctcagtagtgttagcttttcctctgaaatggtggtcctgctgtgaagtgaacttttactgctgtttggggttgtttttctccatcctcatgaacacaacagccttattatgttgatttgatttgattccctagtccttggcactggggccagaatgtcaggtgatgcagttgtctcaactcacgggtctgtagggaaagccaaatagctggatgtcattgctgtgtttctctggatgtttttgccatctgaaatctccatgttcctgtattctttcaggaaaatcaatccctgttttcctttgtgaaagctctattttcattcatagttttattgcagattaaaggctgttgcattagaaagttatcagctaatcaataaacgtcagtcatcccattttgtgataaagctgtcccattgatcaaagtggaaatgtgggcttttggcttttacatagcaatttctgaagttcggataatgtgcttatggaatatatagacctatcctcttatttataggtcttatgtagagatggacatatgaatttatgtgtacgtaatgtacatataagcaggctaatatatacaaacatctgaattttatgtaaaatataacattcttttcttagaattttggttaaattctaagaaaatgagaagtcatcagtaaacttctctctctatatatacgtataggtgtgtgtgtgcatgaagtttttttttttttgccaagattggtattaaaatgttttcaaaaaccttaatgcaaaatttcaatggttgtgaatatagtaaaacacacatgaattttgtgattacaaaattggaaaaatatgctcttattttcatattatttataatagttaagggaatagcagttttagactctttaggtttggcatctttattttggtaacatgcagcttgtcctgttggttaaattcttaccgtggctttttttcataacgaaaaataagttatgttcacaaatattcatagtgccaggcattgtgctaggtgctgtgaactgaaagatgaatacaatactagcaataatactaatcatttatatttgttcagcattttagatttcataggccattttcacatcctgtatctcatttgattctcacagttaccttgggatatagacagagtagacaaagctcatacagttttagtgtggttcctatataaggaactacattcataggtgttgaatggcagaaccaaaactcaccttgtaacattttcccttgtatgcattccagtaaaatgtacaaagttgttattcattgatttgccatgactatacaagtgaattaaagacgtaaaataagtgtttttgccacatccgtgtatacatatatatattcgtatgcttgtgtaatacaataaaagaaaaatggaaaatttatcaaaaatgatttttattcttcatggaattattctaatttataacataatgcacaaactaatacgtatatggaaagcaagggtggagtgggcaatccctgaagttccctgtttgtctatgaaaatctttatgcttgtgctttggattgtagaaatgtggttaagttctatgtatacataggtcttcagcttcaggaatcctgaatgtttgcttaacaaaataatgatgctctcaaaagagaattttaaaattggtttggactctatttggcaacacataattaggccaggaacatttgctaatgtgctgaaattaattgaatatcacattttgcgtcttgtctgatactacttttttatattatttcatgctgctgatagtgttgatgttgaagacactaaagccatatgatataaacgtgatgagatttatctatgggactgagtacattgtactgtataagagtaggacattggacctaggcctcttgagttcaagtctctactatttactagctgtgtgaccttgtacaagcaatttaagatcattgtgcctcagtttcctcttgcataaaaatgggataaatattatctcccctagggtgactaaatgagtatttatatatatacacacacacacgtgtgtgtgtgtgtgtgtgtgtacataacattgtatatgtttatgtgaaatatctaagtaatatatttggcacatggaacatactatataagcttttattctgtatatacaaaaatatatagatatatgaaatacacaaaacataacattcataatatatcacacgtgcattcatttctgatcaacttaactttttgtgtttttcttcatactcataaataatgtctacacctaccaacatgtgggctttatctactgtatctacacatactgtaaatagttgtaacaacttgaccttttgctgttgatcacactaagtagttcagtgtatatctgtaatgatactgttagaagaaactaagaagtgttgtttgttcaaatctactttgaccataggaattcaaaaacaaaaagtgttgcactggaaacattctgatacttgtaatacagaccctactataggatcagttagcatcttatgtgtaagattatgggttatgaattctggccaatcaaggacaccctaatttgtgggtctaacaaaattgcttctatcctcaatgtttttttttatttcaaagttgatgtattcattgaaagggaaaaaaagtgttgatttttcaattaagatgcaacctttacaatgtaaagcaataataattatagtgttcgctcagcctgaagaaaaaatttcactacttaaatagcaataatcaagatgagaactacattagaagggtgctaattttatgatcattgctatttaaataataaaaatgaatccacaggacccttgctgtaacactatttgcaatgaagtggtattcagctttaaaatggtcctcttgaagcccatttaaaattaatgggctgcttaaattgtgaatgaccaaagatcaccttataaaatagctacttttccaatcaatcaattattaggctatggctgggcttctacaggaccagatgtatttgacccaaagtatttcacaaatattagtgcaatcattcttatataataacagatttttctttttcttttttttcttttttttttgagatgaggtcttgctctgttttccaggctggagtgcagtggggcaatcatggctcactgcagcctcaaccacccgcgctcaagcgatctcccaactcagcctcttgagtagctgggactccggtgtgcgctaccatgcccagctatttttaaattgttattattatttgtagaaaggaggtattgctgtgttacctagcggtcttgaacttgtggacccaagtgatccttcctcacaaagtgttggcattgtaggcattagccaccactcccagcatatgataacagattcttatattttcagcccccaaggaaaatcaataacaacaacaaaacaaatcagaatttgagtttcatcaattggattctgcatgctaaatataagaaaaataggttctagtttttctctctccaaaaagaattactagcatcagagaatttggcactgaggtaaaatcttaaagtagctataagctcacatggcaacatgtgagctttggagtaggtttaaatctaagttttatagatttacaaattttataaatttataaattttatagatttatagattggagtaggtttaaatctgggtttaaatctaagttttataatttgctatttttgtgattttgaactaattaacttctttaagctgtgtaagtaaaaggggaaaataaatgggtgaatgtaatgattaaatgaggtatcttgtctgaagaatttggcacatagatgagtattgaataactcagtagctctgtagaagtcaggcagtatcaatatctacttaatttatgtactgtttttagggcagaggactttataagctatagtaacagtaatgaagattcagaatagcaatgttgataatataattaaaggaatttaagatgattgcatttgattaatttagccatgaaagagttggtttgtgatgtcattactgctgccacatactggtagcatatcttccctagacagatgtaattattcattatagattgttctctaagaggtgaacaccgtcttcctttccattgtcctccactagcaactcaaaaagaagaaatactttagatgtagcagcaaatacattacagatctgtgaaagagcctgctctttattttatgtggtaggttgtctatgcacagtactccaagtatttaacttaagaaagataaataatctatgtatggctcccaatttaaaaaaaaaaaggttccagagaatagatctttttttttttttttttttttttttttgagacagaatctcactctgttgcccaggctggagggcagtggtgttatcttggctcactgtaacctctgcctcccaggttccagccattctcctgcctcagcctcccgagtaggtgggattagaggcatgtgccaccactctggctactttttgtatttttagtagagacagggtttcacgatgcaggccaggctggtctcgaactcctgacctcaaatgatccacctgcctcggccttgcaaagtgctgggattacaggtgtgagccactgtgcccggccagaacaaaccatttttaagcaatcattttgagactcattccattttagacattatatgaattacttgcagagttataatgccaggataaagatagataggtacttaagtatctatttatatgggatataattcttatgcatgaaaatatttaaaaaacatgattcctgccttctaaaagcatactgtgaagtatggaagaaggggaagcatatgctgggactagttaaggtacagtagagtgggaagttaaaatagcacctaagagtgcaggctttggagtcctactagttaggctcagtgccccatctactacttcctattgataaccaggtaaccgtggtatgtcaattaatctcttagtacttccatttccttatctttcaaaggggctttgaagagtgaggatactatagatgtgtaaggaggataaaatagagcattcataattattaatattattactattattgtattaacgattaaaaaaatactacctgactacaaattaaatgagtggtccttacagatactaaattctatagtttttttttttttttaagcaagatcaacacagattggagtacttgagaaagacttcatgaagaaaatgaagcctgacttacaacagaatgagaaatctactcaatgaaatattagaaatgacaggaacctggagataattcacccaatatctctgtgtttgttggataataatagctaatacttgtgtaatgctcacgatgtgctagttcctcttctaaacactttataaatatcttaatgcagccaatcttcataacatccttatttagtagaaactattatctctttcttttggtgagaaaatcgaggcacagagtagttaggtggattgtcctgtgtcacacagcagccaagttgtagatctcgctccagagtttatactcttaaccacgatgctacactgtcttgtagctagagctgtgtgccaaaactaagattgtcgggagcaaaacagtttgcccatagtaacaaacagtgcccaagtagtgacagaactggaacgatcttccttggcacctaatttttaatacatgtgtgcttactacataatcgactgggcttctcaagatttgtatgatttacccagtgatgaggggagggcctattaagttgggacaagaccaggtattaattgctctgtccatcagagagaatggtagcagtgtttgaatatagacatacacactggatagcaatgggaatgaagtttgataggtcattttgtgggctagcaaaagtcagatgtattcaaggtttatctgaacaacaacaaatgggccaacctggaaatttctgagaatgaaaatgtcgtgttattggggaggagaaagtggaaagaaaaaagcaaagggtataatgtatttttgtaaatggattttagtatataggcacacttctagttaaccatatttaaaacaaatacatgctaaacaatgcatatataccagaaattttatgtcagtggaatcaaatgtagtaattcaaagaaatagtcactggctaagaatttatgtatgccttgtatggtaagaggagaagcaggctttatctgacttaacttttatccctatgcacaccttcattttacaaagcttctatttacttcaaagaggtgaggaggagaatgcaaaccaggcctatcacggttgtgatcataggattgttttgcaggtggtatccatgtgtttctccaaagttcatcttttctatttgcacacttggaaggaaagcagagcgctctttcatcttcatacttttctagttttttggaactatcaattacaaaggagtgctgtataaatcttctttgtgtgtttaagtgctaatataagctgctgaatatatcagctggctacagtatttgatacaccttacacctggagttacagcagacgctttggcagagctcattgttctaaagaactagattataatgcagaaaataaaataagacagaaatattaaaaaattcattccatatgcaagtttccaccattgtattgtgttggtagacaaccaatgctatttgttgtcattgtttaccatcctctttgatcaccaagttatggaaaaatgattatccctataattgatttgtgatctagagcaaacattgtaatacctgttcattcaaatgggcttgatgccaccatctaagcatctcaaaaggttacatttaaataggtgccttaggcctgtaatcccagcactttgggaggctgaggcgggcaaatcacgaggtcaggagatcgagaccatcctggctaacacggtgaaaccccgtcactactaaaaaatacaaaaaattagctgggcatggtggcggccgcctgtagtcccagctacttgggaggctgaggcaggagaatggcgtaaacctgggaggcggaacttggagtgagctgagatcgcgccactgcactccagcctgggcgacagagcgagactccttctcaaaaaaaataaaaataaaaaataaataaataaataaataggtgacttaggtttacgtagcagtaaatatagtttgacgttttaaaaaaaggcagttaaacattagaacacttgagtatttggatatacctcctcatttaataatagccaccttaataatcacatcttaatttttttgacattttgcaatttttcttggagtcttttaaaaattttattaatccacagaaattagtaactgatatttacttaaatgaaatttatgtgacaataaaatcaaacgcagagtttgtttcctatgtagtgcctctgtatactgtatattatgtataacataaagacttgcattgtgcaaggattagtatgatttgatatgtattttgatgtttctacaaaatgctctgcccaagatagaagtaaaaagatttgtaatgttcaagtattattgcttccatgctgagattttctatttccaataacacctgtacaccactgctacctagttacgctctacattttatgcttaatgtagtaatctaatttccccttatttgcagttagcaagtcaaagtaaaaaatatacattggaatgttgccatgacactattgctatggaggcaaatttagtaacaggtgaactatcttggttcccatcagacaaggcttggttcctgaaggatggaaatgatcttattatatggagttctctcctgtaatatagccttaagggtacactcctggaatagtgtaatagggagactctagagccgataaaaaaaaaaatcctgtgaactagcagctgggaggttgtatcaacaactctataaagtgtaacaagaatttaacgaacatttaagaaggccttctggattattataaatagggtgaaaattaagaacatttcttaggttacaagtgtatgtaattagtgaatacttgtataatacttgattttatattttcggctattgtaatatttctttatcactagatcatatcaactaagtcaaatgtaattgtaatttggtataaatatgacttaatataaactgcatgcggggtattggtattgaaatcagatttaacaagctgcatatctatgattacagcacttctcagtaactgttcattttaaagactgtgcaggtggacaagagtaatctcttaaactccttatgaaatactgtaatttggcttggttcatttgtgattcagaactcccaaatggatcccgatgaaaaattagagatgtgttcttgtagaaaaaaatgagtgttttaagaaatcacaaaaattactcataatatgctaatataattcaaaaattcttcattccaataatagttttcttgggagtacatcctctaggtatggaaatgtgatctgtgcattcactgatccaatacatttagttcctacaatacttgcaaagtatttaaagaggtattcaaattagtttcttacataggtgtcttacacagtgtctcctcactgtgtatttcatggccaccgttaagtctctccaaggctttcttgcttggctttccttgtcagcatttggcttgtttgcttcttgttgtattggcaatggctgggtttgtgtcagcagagactcttagagttcattattctgatgtagctcttgtgctgtaaatgtttttaagttaatatttattttattgttaagaaattaaaaaaggacttgactgctttaaaaaaaagtggccctgcccaatcacagtctttacttttgtatgtcatacatctccccttattttgaggggggattcttaatctcatacagttaaatgaaaaattttcaagttgggtgaaatactttcggtagaagcttttctgtaagagtggcagttcctcatggaaactccttcaatatacattgaattaaatatcagaagggatttttaaagaacattttcaaatttattttggggtaaaaattataaaaatgttgtgccaaattagtagttggttcaaataaaatgtttttgcaagatttaccccagccagtattaacagctgtaacaattgagaccaggtgacagaaaatttcgttttaagaaggtgtttattgtcaggaaaattgtgaagtttcctttgtaattactctatctttgttattttggcagcctgtaaagttttattggcatttactgaaaggtactttttttggccctagccagctggctttctttttttgggcaaactttcctagctctggtattcagaacatattttcagctttgattgtctaccaatggggttgttttgaacaaggagccaagtgactagtgatgtctgaattgatctcaatcatgtcttcagtagggtgacatcagaatgctgcaggtgtacttcaagcattgagggttgtttccagcatgtcattttggtgctaaaatagtcaatttaagaccattcaaactacagatcctttttacatacagactggaagaaaagtatgtgaaatgatgtatcaaaagtgaggattcaataactcaaaagagaataaaatttttcaaacaatataggatcaccaaactgagattgaaagatcctttccaggagctaaatattaaacaggtaatgcacaaacatttgaagaatggaacgataatagtatttccctagattcatgagtatgttgtatagatgtggagttttagtcgtcttggtgttggccttctccactttgtaagccatgtaccattgctcttacctctgggcttatttgaagaattgtttagatcatgctaatccgtgtgagatgaattctaaatttagaattatactgctctggttctgaagcccacagtaataaattcatttaagcaagtatttgcatcactgattacttattttattgcctttaaaatactgctggagaaaatgattttattttatttcatgttaatacatttattggactacttgttgttagtgagtaatacttacaaatcttagaaatgcctttttagtagttattatttcaaagccatgacaggcatattagtatttggtagtcttctatggcaatgcaatattaattttgttttgtatgttactatggcgcattgataaaataactaatgtaaaatcttaaggtggagctcctgtgtttgtgatttaataaaaaaggaaaattaaagatcatatttatcatttacttctgaataagccatcttgagatgctacatcttcatccactatcgtctgtttatgatctgctttcttttttgtagcactggatttcaaggaatatatttaccactttgttctaaactatttgttagagatctatacagattgcctacagaggacagcactgtggaatttgttctggcatcctggtggaggtgtgggggatgcagggtagaaggaagcccacctttttctttcttttttttttttttttaacatgttcttatgggaagaacctgtcttcatagtcactcagtagccaggacaaagcacctctggtgtctgcacattctgcaggcccatctgccgtagcattcctcagtacttcatcctggcctgagaaacacccggaagtgctgggatcttccagctcctactcagctacgaataataacaaacacttcccagtctcttctaaatatgtattgtccattatttgaaacaaactacagaattactaggcagagaagagatttttatttttggaactttgcagggcttaaagagtgtccctattacagcaaagtgggacaatttctgtagaagaggtgtttcaatattcataaaggtcataattaggtaatttattaagtatagcaaattttgagaggtgtggatttggatgggtatcttgattcaggcacttcatttcaatttattagatctgtttctcaaatagctccagcttgttcaggttttattcctgccagttggatatgaagtactgtatgtttgggctccctgtacagaatttgtttccaaaaaaatagtgtcgtgctgctttccatctactggaccagtaggggtaggacgatctgatttgaagccagtgcaaaatgcaaaactgattagatttggattgttcatacattaggccttcctttccctgttcttatcctttttccagatggaagaaccagtttcctcccagggcactttctcctggcaattagactgtgaagatgaggatcatttagtaccactactgctgaagtaccattatattaagtttgggctttaaaatttagaggaatgaatcaacatattctgtatttggtctctttattttgcaattaatgacgcttgtgatgcttttaaaattaggaatctaactttgtctttcagttctaccttttctttattaatatactaacatcttactttcccacatttcctactgaaatgtgggaggtccctgtcccactgaaatgtgggaggtcccctactgaaaagtggggggtccccgtagtcaaattttaaagcatcaagtgttttaatatgttaaccgtattacatgtacctctttctaacgtgcattatgtaccctccctcccttcttaaatatagtacttacacccaattttgctttttcatggtgattaagggttgccattatgaacattggttgccaccctttgctaaaatgcagcaaatgccctcagttattattgaggcttgtagagctctgtgtgtgcccttattagtaaatggctttagaatgttatgcccttggaattcttgtaccagacctttgccattttcctcttctctcttacatcagtaagtaagcaggcacttacacgcaggcattacattttagagctataaaaaagatgacttggcctaatggcttcagcttgcagattaggaatggaagcccagggaggttgcacagttagtccctgattatgcagctagctggggtaggaactgggtagagattactcgactcctaatccagtgttctttcttccaggccacacctttcgctttttccttctgtcgggataccttgtcctaactgacgttttccatgtttatttatttatttatttattttgctcttagtgtgtagttgactgatagagaaattggaaacaagattaaatagaaaaagtagtgaagtaacatctgatggcttgaagctctgtttctacgagtcagtgtacatccttgagtctgtttgtcttctgtataaggaagtggttggactaatactagtagtaacaaacatttactgagtacttgccacatgtcagctactatcaagttctcattatgtgttacgtcattaaattcttacacagatcccatgaggaagttctgtggggtttgtgactttacaatatttgatgttataattaataattttgatattacaatatttgatattacaaaaggggaaactgagtaacacaaaggttacctagcttaccagaagtccttcagttagtaagtggcaaagccaagatttagtctccatgttcgtaaccagtcagcttttatgtggccgggtcatctatatgttctcttttggctgtaacacttgatgattctgggtttgaataataacaccaacaattaacatcattaaggactcaatacacactttatacgtagtgtggctcccttagtcctatcggaaactctatgaggcaggtgctgttattatcccattttatagatgagaaaaccgaagtacagagaggttaagtggattgcccagtcttatagttaacaagtggcagtggcaagatttggaactaggcagatttaagtgcctgctaactttgccactatgtcttattgcccgtgagcaggtacttgagtatttaactcatgagtgtgacataagttttataatatttatttttgccaattagagatgatgtgtatgtgtgtgtgagagagagagaacatgcacatgcacatttacttgtacatatgatgatttcttatctatgtgttaaatagggggtaggcaggctgataagtgagtgaagtgaacttagcccaagtggtatggggaatggagtggtggggactgtgggactgtggcatataggaaagcacaggtcctggccaaaggggcagctgagagtggctcagccaactcctgacctgtttttcaagcaggaaattggacccagtattgctcgatattgtgtgtgtgtgtgtgtgtgtgtgtgtgtgtgtgtgtgtgttcctagagaagccagcagtttggatttctaaaccagaagattttgaagctgatttttaaatgatcacagttaattggttatttgcaaccactctgaaacaaagaaatgttgtcaacctctgagttagatcatcagggctgggggaaagtgaccttctgaaagtgagagttggccacatcttggtatccccactactttttgaaaagatgaaagatggaccccaatctggaatacttacccattctcttctattaagatgttatggtattctccaatgtagagacagttgaatttttaagtctgcttttgagaaacagctgccttatgaggctgcagcattcatccgaaggccaccagtctgtcctcaggtctagtttccaagtctgtagacacctgatcacttccggggctttttcaaactgtatctccttcatttaggtacaccctggcaagactactcagggatccctgcaagagagtgtgaagttactgttactggtaggagtttgggatctctctctctctctctcatacacacacacactcacaaaagtttgatgctcccttctgtgaaatgagtttcgagactcagcacttatttttgaactgcccaggaagatccttgcacgtgctaaggatctacttcaggaagcaaggtgggggcatattgatgactgcttgccttcccccataaaggtagctccactctcatctgttttgcacattgggcttccaattgtgattcctttagtacaaaggtctccgaagctaaaacaaacactggctcaatcctgaaaccttaatcatatctaatgtctgcttcagtttaaaaaccctgatgttcctaaaaagggatgagagttcacataacttttcccctgtgttgccgaaataacttccaggggcagactgggtatctgatctctgcagactgacaatactcctttaaaacttggtggcatttttgttttaatggctgctctccttaaagaatattatttaagaaaaaaatacatatcaacttgctgtgctatggtctaaattcctgtctcggaaatattataggtgaatgtatttccagatgctgcaaataatggaaaatcatgaaaactcgaatcagggtccctgtccttaaatgtgtttcagtttgcattttgatagcagtttagaaatgttatcgcttgttttgtcacagacataattcacatctttcttcaggcactgtaaacaagagaaatggtttaatggccccataaaggcactctgctgatggctgagattaggccctttagtaatggatattggtgtgtgtatgtgtgagtggtatatgtacacagtgggggtggggagggcttggaagaggtaaatgtactagaaagaatctttgagagcctcagatgcagctgaaaatgccttctgcttctgtgtgtcttagaagatggattcacaaagcatgtgacaccattgtctttatttatactcaagccttcccctttgcttctagaatttaactgagcactaattgaggtcattgcgatccatttattacctgaaattgaagtgatattaacttaaagtgaatgcttttcatctactgagtgtattcctaactacatatatttgtataaaaggctgtgtgcatttttcatgccatgcttgtatctggtcttaaatatatctaatttatgtataccatttacttctcccctcccttttacagagatttttttttttaaatcactgctatagccaagtgaaatttttttttacaagcactttagtatccacactatgatttgttttgactttttcagttatattttttagacaggtgcaaaaaattctccatgttatacatcatcaccctgatctaagtaaattccttgaaatttctcaaagcacataaatttgtagttttagtctcaattttgtgtcatttttttaatcagctagtttgtgtatattgctgtaaaattggctacacaaggctgcacatttttggttttgagagacagagtaaaccaagagttaagagattaaaattaagtgtcctttgttgactagttgagctgtctctgtcactagcaggtgtcactttccatccagccactttggtgttttccttctcctttttttattatagactatattctggaacaggaatcagcaaacttttctctgtaaagagtcagatagtaaatatttcacgctttgtgggccatatggtttctgttacaactactccatttggccattgtagctcaaagtagccctagactagaccgaaatgaatgggtgggagagtgttctactaacgcttcatttacaaaaacaggtggaaggccggatgtggcccatgagctgtaatttgccagcctctgttctagaacagcatacagaagactattctaaaacatgatttttgaacagaccagaaaacgcaacctcaaaataaagagactgtcttcaaggctcttcctccaaaactatggattttatttctgtttagagaagaattaaaaatatgacgtgtttctcttcccagggtaattgtttgctactcacagaaactgataaccctatttcactcttaagacaagagttgggaggaaagcagagtgaaaggtcagagccaagacaacttatcactgtatttactttcgctgtccacatatagaaggagacctttccatcattgtgacattttggttatcagagtataagggaagcttcaactgttgaatagcaacattcttccttcagtggaatatgagtggtgtgaatttttaaatgcctttggtcacagtaataaattgaaagaaggcagattgcctaaaagcaaacgtgaatactctgagaagtgtttttatttagatacacgtgccaagaatatagtactaaggtcatacatacagatacatgtatctgacacacgtgaattagtcaaacttaaagaatactgcctaatgtctttattagggaatttttaaaacaccaaataaagctctaattggacttccatgagctcttgataataaggactgtgtcttactatttatcttcattccatagctccatattccttcaccctctcaggacctgccgtagtgtctggggcatggtagatgaattaacaaatgaattaatgaattaattgctgaagaaatgaatgaataaaaatctcatataatgtgatagtggtgctcatgcatgaaggaaataatgagtgtctgtgtataaatcaatttgaattatatactcaagagttcaacaattacaaccttaagattgagcccagggctctaattcttaatgtgttatgacttagtgttagatctttagtcagacatggtgcttagcttctttgtgcctttttaaaagatctgttaaatgggaattattatatatgttcctgtcttaactgatgagaatcaaatagagtatgggacaattctttgaaaatggttaaatattatgtgtgtttgagtttgtttttttttttttttgtatagttagtgttttctattaggattacaattagtattttctattagaattccaaactcaaccagtttgttaagtcaacacttaaacatattatctttgtttaatttacaagacatcatccatcatcttcactgtaaaaatataaacaaaaacatacatcattcatagatttcattgttcattctctggatttacattaaccagtcagttgtaacaaacattatctgttttcaatgtaaggatacaaataatgccccaatgttatgattgtttgggaagttattctcctatgagcaaatcttaaattcatattctcagccaggtgtggtggctcacgcctataatcccagcactttgggaggccgaggcggtctggagtttgagaccagcctggccaacatggtgaaaccccgtctctactaaaaatacaaaaaaattagctgagcatggtggcacacacctgtaatcccagctacttgggaggctgaggccggagaatcacttgaacccgcgaggcaggggttgcggtgagctgagattgtgccactgcactccagcctgggagacagagtgagactctgtctcaaaataaataaatgaatgaataaataaataaaataagtaaataaataaattcatattctccccttatatttcaagtgttcaaatgtgattttacattatgtatctaccctcaaccaaagctgtagttgtataccagcattgttgcttttagaaagctcagggcatttctatcctctggtagaataataatgacaagattgtgccctctttctaaaatataggtagaaaaaattgaaagcaatgatgtgtcatagttcatagttctaaaatgaaaacagttactagttaagcaaacacttcatgaggaataccataaccccaagtaaacttctgaattaagaagtggttaagtttattttggaagtgcattttttaaagtcttggtattttggagctcttaaatttaaccattagaagaactcaagtgatcattagtcagccttaagatgtggttttaaaggtcaagcttccatcaaagaaaaaatgcaagacacatctcttgagtgttctttctgcctttcctcccaaaaatttgattgtccggaggagttgtggatcataaaagtttccatggaaaatgtgtttgaagaatgccagaggaagactgcagattttctagataaattatctgacctgtctgaagtcagggataaaaaatataatatcattttgaaccaccactttgcaaatgaaatgaaggagtcaactcacttgatttggtacacttgaagaaggaaagattcactttaattaaaactacaaacaacgcagatgcctgtaactctgttccagactcagcaaggatggtactgtaagagaaatgaaaagtacctagcagcctcggcagcaggctggagccgtgttcaacgaaagtaatttaattagtgttgatcatgactccagatgatggtgatttgataaggaataatttagtacttaacagccttttacatgcaccaactccatgtgggaaggtaaagcaaattgcacaaaatgaatgtgctgctttcgcttgtgcctgtgccaatgaactggaaaaccgcctgttagcagactcagattctcagccctgtgatgaaatacccaacacgttttcaactcagccctctctaatgggagtctctacactactcttatttaagaataaataagagaagtcatttttgtgacatagaatctccaggaagcaggaaagttaaaataaggaaaataatgtagcctacggcttttgtgctgtaagtcgaagatttttaggttggctttctcttttttcctcacatgcagcaattcaaaaaaaaaattttttttgccaactcagattcattggattacttatttggcttatgattagaaaaaaaaaaaatcagtttcaagggcccatagtgactgaggcccacataggttgaacctgttatggagagagttggggatctcaaaactactggagcgggagaacttgtaagaatccttgagcgttggcatctaaggaaaaggaagatgttgctggattttttaaaaaaactcttttcaactactggacctatttgaatgcggcatacatcagatcacagtggattcaaatttgctcaattatgagcatcacctaaaaagttttataagattcagaatcctgatacaacccagctctaatgaatggaatttctgggagtggtgtattaattttctcgagctgctgtaacaaagtatcacaaactgggttgctttgtgaaatttgtttcacagttctggaggctggaaatccaagatgaaggatgtcagcagggatcggagggctgtgagagggaatctattccctgcctcttccctagcttctggtagtttcctgggaacctctggcattccttggctggtagaggcctcactcttacctatgccctcattttcacgtagcagtctccctgtgtgcatgtctctttatccagattcccccttttataaggatactagtcatattggattagtgctcaccttaatgatcttatgttaatttaatcttccaaataagagattctggtgttgaaatttcaacatgtaaattttgatgggacacaatccaaccaataacaaacgaggtctgagaatctgtgtttctccagcagctccctagataatttgatgatgtgccagatttggggctcctgtgttcagggatcagcttgcctctgataaccctttgagaatccttatgccctgcagtagactgaatgtttgtgtccccgtctcaccacccccgccccagcaaattcggatattgaaacttactccccagtgtgatggtatttggaagtgaggactttgggaagtgattaggttatgaagatggagccaatgggattagtgcccctattcccttactaaagagatcgcagggagctcacttgtgatttctgctatgtgaagttgcagcgagaagatggctatctgtgaaccaggaagtgagcttttaccaaacacttaatctgctggtgacttgatgctggatttcccagcttccagaactgtgagcaataaatacctgttgtttataaaccatacggtctatggtatttttgttacagcagcctaaacagactaagacatgccctttcttctaaggtcacttcgggaaactcactgggccaatctgaaagcagtagagcactaaatagcatttccactagcatggatcatgccttttgcttctaggtccatgctaatggacattttgatagaaggctgttgttatgctagcagccattcctgatggcaccccaaacatgccattcctctccaccctccatttcctacccatctggaataatttctcctgtgaagttgaagcacattttcagatgtctcagctgggtcagaaggccatacatgttcaagtaacttaattagtgtagctttgattaatgtccctcagagttttttaaactttatattgatatacattcattataatgcaaaaatctgaagtgcatagtttgatgaattttacatgtgtatatatccatataaccaccacccagaagcaagatataaaatgtttccagcaagatatatttccgtaactttgtacctgtgagatcatctgtttttgcatgtaatttgtccctttttattcctgtattcattccattgtatgcatatgccatgatttatttatccatttgcccattgatgaatatttgagtttttccagtttttgctatcatgaataaagcttctttgaacattctcacacatgtcttttcatgaacatatgcacccttttttcttggatgtatcctaagggtgtattaatggatcatagagtagatttctcttgccctagtagatattgccagaaagttttccaaagtgcttattatactaatccataccctcagcagcttgtataaaagttcccattgcttcatgtcttcaccaaaacttcataatgtctatcttttgcaggttagtcattctagtgatatctgtaactatctgatacagctatatagtgataatctcatgtggattattttgcagttttctgaagaataaagattttaaatacctttgcatatattttgttgtcgttccgatttgttttgccatctggatatctgcttttgtgaactactggcctgtttcaagactttttgcccattttttaagtggggaatttgtcttgtcttactgatattttgcaattcttattttgttaaatgagttcttcatcagatctttctacttaaaacatcttatagcttgtgacttactttccttttttttaacagtgtcttttgaaaaagtgttcttaatttcattgaagcctaatttgctgatattttttcttttatggttagtgctttttgtgtcctgtttataaatattttcctacttcatggtactcaagacttaaaatatagtaatattaaacattatagtctccaatatggctgacattttgataaatatgataaactttacatcatactgcatgcatatttattagctatagagttcatcaatttttagtcatgtaaacctgatctaatctctcaagtataatatgatttgttacttgaattccttatatgtcgctgctcctttttcttatgaaaatgtaaaaccaatacttaatctgaagtgctaaaacttggatatatgcatgttctcacttataagtaggagctagatgatgagaacacatggacaaaggagaacagacactgggggctacttgaggatggagggtggaaaagcgaagagggtcagaaaaaataactactgggtactaggcttagtatctgggtgatgaaataatctgtaccacaaacccccatgacacgagcttacctatataataaatctgcacatgtatccctgaacctaaagtgaaagttaaaaaacaaaacaaaacttggaaatacacactttgctaaatatgttcaaagatgtaataaataatcgaaaaccacttgtttaaaaaaagaggccgggcacggtggctcatgcctgtaatgccagcattttgggaggccgaggcaggcggatcacgaggtcaggagatcgagaccatcctggctaacacgatgaaaccccgtctctactaaaaatccaaaaagttagccgggcgtggtggcgggcgcctgtagtcccagctactcgggaggctgaggcaggagaatggcgtgaacccgggaggtggagcttgcagtgagccgagatcgcgccactgcactccagcctgggcgaaagagtgagactccgtctcaaaaaaaaaaaaaaaaaaaaagaaatgcatggttaatgtattacaaagctgtgtcatttagtatttcttattctaagatctcgcctacacacagacaacacgcagatatacaatgggagacaattttcttactttatttatttatttatttatttatttatttatttatttatttattcgaggcagaatctcactctgtcacctaggctggagtgcactgccgcgatctcggcaaactctgcttcgcgggttcaagtgattctcgtgccccagcctcccgatagctggaattataggtggacatcaccatgcctggctaatttttgtatttttagtggagatggggtttcaccatgttgaccaggctggtctccaactcttggactcaagtgatctccccacattgacctcccaaagagctgggattacaggtgtgagccaccgtactgggcctagagcactactttaaattcttcgtgggttttcttttcacatttaaaaaatgtttacccaggaaatttaggacacatagacaaacgttaagagaataatgttaattccctcctgcccttcaattggcttttaccatttatcaacatttttctagtcttattcatcactttcctcatacacaattattttttctagagtattttaaagaaaattctggatattttatctgtaaatattttatgaacctctaacattaaaactttttaaatacaactattgtcacatccaacaaaattaacagacattaaattatctaatagctagtctatactaaaatgtcatttattgcagagttgtctttttatagttggtttgttcaaatcagaattcaagtcctcataattgattcttgaggctcttaagccttttctttcagaagaattagagctttctgacttggtaaagttaatgcacatgagtattcttgatatatggagatagacaaaatttctcttttttcttttctctttactttgaataggcgtactaaacatgtatgtacacacacacactacattaaaaaatgctttgaaatagtgtaccaagggtaattattttattattatgtgttaagtttctcttagatcacttaagtaaaatgtgcgtatttggcaaatttgttttctagaatatttcagatgactcttgattgctgttgaacacttgtatcaaaattatatgcatataaaacaaatagtatttgttttcctgaagcttggtagtttgtgatatcaaatttttatgttaaaaattatatataacattcaagctaatgcaagtttataattctgtaatgccgtcattaagattgaatgacaaatgacatcataaaccacaaaattcctcttgtcatatcttcctttttggaaagcggacttaacatactgtgttttaatttcagtttctataagagttagaataaatctccagaacgtgtgtctctgttatgtgtttatcccttgactattcatacctgtggatattatatgtaaattacagaatctattcttatgattattttttccttttttaaaccaatttcccatttataccaaaaatttaattattctgataagatttctaataggcatttcttcagtttcatatcgaagaataaaaaatatatagctttttttttcttttttttcttttttttcttttttttttgaggtggagtctcgctctgttgcccaggctggagtgcaatggcatgatctcggctcactgcaacctccaccttctgggttcaagcaattctcccgcctcagcctcccaagtagctgggattacaagcacctgccatcataccggcctaatttttgtatttttgttgagacagggtttcaccatgttgctcaggctggtcttgaactcctgacctcaggtgatccacttgcctcggcctcccaaagtgttgggattaccggcgtgagccacggcgcccggcctatagcatgttttttatttattggatttacagctgtgattccctccccatatacgtatttttctagttttcatattttgtgatgtagctttgtacgttattaaacataaatgcatataagcattactgtgcattaagtcacagtaaaaaggtgaaaacatcatttcatatagaataattgtttcatggtagattacatgtgacaaacaacatttacatatttctcagatttcatcttcacagttctggtaattagataggcagatacttaatctctattttatagatgagaactggcctcaaagatgttgagtttttgcccaaagtaatatcagtcacttctggacctgcgcctggattttctttgccccagtctagttgtcatttcattaaactattattattgatgcagttgatatattttcctttcaataatgcttaaaattatattttggtctttagttgattcttggctaatcatctgtaatttttctgctttagtcattggaaacctttctgatatgttttcaaaatgtactttcttgaaactgagcttctagcattgttaatatcagttaagcaaattacaagtgattcacttaagtaatgagagaaaattcaagcatgcattttgttacacaataaaggcagaaaaggcgtatatgaagattctctgaaatcttctgctactgaaattcatcaaacgtgatttttcttacatatgtaagttaatatgaaatgtgaatgacctttttaacaagagaagtagaacacattaatctccataattcctacagcatttaatttttgtggatatttttgttcttttttctagtggcttttcatggcctgccactgaaaatcaagaaagaaccccacagtccatgttcagaaatcagctctgcctgcagtcaagaacagccctttaaattcagctatggagaaaagtgcctgtacaatgtcaggtaaagccaccaggtgtatgtatgtaggatagtggttcttattgaatcaaaaagtccagaataatatgaaatctcaagtcatattttatgagtaacgtctttaatatgtaacaagctaattaggtaatgcatttagcagaactctaaagaaccatttaccatccaatcacacactttggattcattttaaagcaataatttttatccagatcattagttgcttttctactgtagtgatgcatcttgggtttgaaaaaggggttttacttggcacaagcagcttttgaaagttcccattagaatgaatgcattatacactttagatagagagtttgcagaaaaaaatgaaacatttggcaggtctgagcagtacattagttatctgccaggctttgcagatgatctgtaagatgagttcatggacaattgcaataaaactggaatttcataaggcttagcagaggctattatctattaaaaagctggttgttcttctgatgataataaagggtggtgcagtaaaagtgcattgttcatttattagaaaatttgatcacatatatgttcattaaaaacccttcaaagtaaattgtatgatgctacttttcatattggcctttaattgcataaagaaaaagttggctgtctctactgagtattatcactctcaattacagtagaaacttagttcttaaaagaagttagtttgcaaacttacacaaattattccaaatattcatactgttttataagttatatcaattcagattcattgtacattatgacccaaaggggtcttctattaaataattcctcagatatttattgcatacgctgtttatgtccaagatatgtaagattctagaaacataggccagacgcagtggctcatgcctataatcccagcactttgggaggcagagttgggcggatcacctgaggtcgggagttcaagaccagcctgaccaacacggagaaacctcgtctctactgaaaatacaaaattagctgggcatggtggcgcatgcctgtaatcccagctactacagaggctgaggcaggagaatcgcttgaacctgggaggtggaggttgctgtgagccgagatcgcgccattgcactccagcctgggcaacaagagcgagactccatctcaaaaataaaagagaaacatagacttgtgccattatggcagctgaccaatgctcagatattttattaccatttgttcttgcaaacttgtcttttatatttgcttttctaagaggttcaccagagcctgaaattatgagctagctcaattgaaactgcaaagttttataaaaaaggtctcttgtagaaggtaactattaaagcataatgagttcagataagacagtattgatcgatctgagttttattttatagtttagttttgtttttgcattttctccttacaagtactgtgtatccacagcataattatttaacatattgaggaatttctagtcaatggcagttagatatagaattgtcattgcctttcagcattaatcagaattgtgactgtgaaatcatcactgttttatatgccatatctgacatccacaaatcaataataaaggaattgcctgaatattttgtgtttcttttgggggatgaaaagtccccacagtgatatatggcatatgcaataaattctggtacttccatcgctatacagaaaatattattgagtacagcatttcatgggggaatagtatcatttgtttcttcattcatgagaatgagttaggtgaaccatttcacaaaagaagtgggtttttcttcagaaatactggtaaagaacataggtggaaccaaacatgcaattcattatatgaacactgttgactttgctttgaagcaagagctgccttgtgcagcatatattcctttactccttgtaaaagatttttgcagctggatataattccgttgcattgatggagcaacagaataaattattacataatttaattcaaaaagaaatatttctttctaaagaaaaaagtgtactgatgattgctttttattttattttacttatttttttttgagacagggtctcactctgtcagccaggctggagtgcagtggcacaatctgggctcactgcaacctctgcctcccgagttcaagcgatcctctcacctcagtctcgtgaatatctgagcctacagacatgcatcaccacgcccagctaattttttgtatttttagtagagacggggtttcaccatgttgctcaggctggtcttaaactcccgtgcttaagcgatcctcccacctcagcctcccaaagtgctaggatcaggggcatgagccactgcgcccagcaaaatgaaatacagcattctaacttagaaatgccctgttgttaaaaaaaatttaagaaaatttagttttagtaaaatattttatagatgaccaaaattagctaaatcacattcctgaaagttacacctaggaaagcagtttaaaatcataatgtaaaatcaagcttactcattttattcttctgtaactgtgtttagaagttagactataataggattttattcctaatgacattattttttacttattctctaagaaagtttaaatatatcagacattttaatttacctcattaatcttcattatcccatgtggggaagttaatgccaagcatcatttatttaatataataaaatgaaaataaagtaaaagcattgccttcttaaaatcccaccacaaataaaagcaagccaggtgtggtctctgccttattaagctgatgttagttcttgttttaaaatcttacataatataaaagaagaatataatatcagaagtatttaatgatttaggaaagatctatcaaactttctcaaatagatatatcaagaatagatggaaaaaataccactgcttttttggacgtaattttccctgtactaagttgtttgtatatgcattaaaaatacacatttaatatttgttctgttacaaggttttgcattaatcatcctattttctgtttaagggtgttgtgattttgaagtttatctgttctggatttaaacaacaatagcaacaacaaagttttcatttccatttgacttaagtctaaaatatcttttcttcctttggattagaaacttttttaaaaaattgctccaaagaaagaaatgttctctcttcttttgtcccctgggtagtgcctatgatcagaagccacaagtgggaatgaggccctccaacccccccacaccatccagcacgccagtgtccccactgcatcatgcatctccaaactcaactcatacaccgaaacctgaccgggccttcccagctcacctccctccatcgcagtccataccagatagcagctaccccatggaccacaggtaacctgcagataccagttttctagaaactgttttttgcgttcttggaaaaaatttctattaacaattctgaaggcctagagtagatttaaggtgagcctattaattttgcacatctgtgcaaaatatttttagaaagagctcactctatctatacttataatttgtggagaaagtcatttataaacattccttttataaacatttaaattggttgctaaaatggaaaattaatctatctactgacatttgagcatttccctttcgctttgcttgaattaaattgcttcacttaaactttaaatcagatcatcccatttttatgagcatatgtgtgtacttgttctgtaaagttaggagactaattttagtaggtagcttatggaattaggttttctaccttatattgaatggttcagctgtacatagttttgcagaatataacttatttgattaaaactgttgaccatcttttccaggtgattaatatttaatatcagtagacgcatgactctggacactgcgaatatacaattaaagagatagagactcaattagtattacttagaaaggagcaaggcaagaagcatagcatagatctaaggagaatactgcgttaggtaattcatgactccttgagattaagaaattcatatttaagtaaaatactaaataaaacctgtagaggttctgagatgtactaccttaatatacagcttaaaatcaggttgcttatatacagcatctctccttctttatctcttctgccctgtgcttctgtatgcagtggcgtgctggtaaatgtttagcaacagcctgcatgagagaaaaacaaaacgccctcatcagtagcttttgctgggtctgtgatatacatattgctttcatggcccactacgagccatcactgtgagaaccctgaatgccgagttgcaaagatgcaatagcacagcgtaatgtagtatttctagcatacggataccagagacataagtaacctcaggtgtataattggtaatgaaatgtagtaagataattagaaagtgatgagttttgcatttttatcttctgtttttaacatattttttgattgtgaagttatataatttaactgttaatagtggctgtgtttaagaactggctcaaaaaattcctgcaagtttgacaataagtcagtgcaaactggccctgagacaccgttgtaaaaataactcagccaaaggaatcttctagatcagcagaggaaagcagaagatgtgccactggcaactttctgaaaataagggagcactcaaatgtgctttttataggttttttcatgggactcaatctcaaattcagaaactcattttgctataaagggcgtaagatgaaagcgttctttacaatgtgatacaaagccttgtcttttccacccttggttccatcactaagtcctcttgtggggtagttattaaatgcttcctattatctttttcttctcaccctgtagccttgagactttgtcagagtgcaatggtatgtgcatctgtgtaaacagttttgtaaatacagatgaaagaattcttattgcagggtgggccattaaacagatggacattgtgcagagctgaaagggaacaaaaaaatatgaacaaaccaagttttattttctccactactggtgacttctgagttcttgataactgaatctcactcttctgatcagtgccagaattatagattgtataattcgctttttgtgcaaactggttatttcttagggaaggtgcctgctgaataagcagtgtgcctggttttaggtgacctaacttgaaatgctttagccaaattcattttagtttctctacttgaagtcagatatttgagactgagaacagccggcccggaactccaagagggaagctcggggtcttttcccactgacccctgactgagttttgaggacagtaccagctggccagtcccaggaaaatctctaaagccgtatgtttctgaggaggatttcttagagggctctggccaacaaatgacagtccctcagttataaatggcaaatttgctctgggaacagatcctttccccaaaacaccccctccagccaggcaccccacttcactctgggaatgctttacggccaactggcctgcaccctgcttcctttcctcagcctcactctgctcctggggccagccctttggcactttttcctgaacccactgtgcaggagccctgtctctctttctcagtgtttccaccacttacaccctgtttttctttatctgggagttcatcagcatgttctccttatctgttaactcctttccagaagcttcttgaatcactttctctttaccattggtcagtggctcctaagaattgcaccaaaaccttgcaaattcctgagaagcatgcgtgtttgatatatacatgttccccagcaacttccaactggaatcaggtcgactcgtaaaaacaaatggcttgattccttacaaagctttcagttacaagtattattaacttccttttaaggcttcacaagtgagccagtttcttattttaacttcaagttacaattttctgattcactccttgacagttcttaatgataatttctgtttctttttttggctaatgaaataagcaagagaagggaaatgaatgcagtgccagtcagcctaactgctctgcaatatccgagtttctaagtttattttctgcaggtgtaggtggaatttcagtgctttccatgaccaccagtgagcctagagttaaatcacaggatggagtgttcttagaaatgctaaagcaatcgctttgccattctttagcttttaccttatttttatttaacattaccgaaattaaatgctaactttccaaattaaagtctcaggaatgcttttagtgggggggttattaggcttatatttgctcatagaaatgttttataggttatttttaagcactcctggggcatttttagagcacttttaaatctttaattaatccacatctttgtggtgggtcaatgatattatggatgagaaacacagaacagaacgattatgtgattagccaattgttataaagtataaccaagaacaaagaggcataggactcatttctagccttctgctgaggcctcagaacttcctcatgtcctaacagcgggacttgccccaaacctatacaacactatatgttattttcacctttggagatcagctgtgcatttatgcttatttttatcaacctgatactgtatttgaatctattggaagccaatatggtctgcattgctgtttgacagtaaagaggtagtctttttacaaccggcttgggtttgagtccttataatacctagttttgtttcttactagaacgcaatgttaattaggacattgttgaggaattgaaagtcctgatttgagaaaaaagtcattcctctcttgctttctcagcaggtttttggttggttggttttttgtttattgatcagtttggtaacagaattaaaagatagaggatgcagtttgagatctttttctggtatataatgatttaagaatcttgtgtggaaattatccgtgatccaattgatttagaactaggcattttagccattaatcgttgtgtgtgtgtgtgtgtgtgtgtgtgggtgtgtaaaatcctcaaagtttttcattgctctccaatccttactcaaagtacatctttaactcatatactgcaacagtgctgcaaaagactgattagaaagggaatataagtcatatgattaaaaaacatagagctactaatccaggaaagaaaaacgtaatgcttgttaaagatttacgcttcaggtcagctggtatcatgttcgttcactaagaaatggaaaaccgtatccgtattttaaagaatgttccatgttaccgtttcatctgaaacacactctcttattccctagatttcgccgccagctttctgaaccctgtaactcctttcctcctttgccgacgatgccaagggaaggacgtcctatgtaccaacgccagatgtctgagccaaacatccccttcccaccacaaggctttaagcaggagtaccacgacccagtgtatgaacacaacaccatggttggcagtgcggccagccaaagctttccccctcctctgatgattaaacaggaacccagagattttgcatatgactcaggtaggcctgcgctctgcgcaaattacattcaaggcactttttcacctcccttgtcacattggttagtgttggtatcagactaggtagctcctgaccattttttaataagatctttcagattttgtccgttcattgaaacttcatctacgtgtaaagatttgaactatcaggtcattttgacatgaggtgatggttgaaatagtgtctggaaacaaaaccagtttaaagaaaaatacactttacagaattatgcacagtctcagctcgagagggacattgcaattttttttcttaattctgtacttttttttcttcttattttgctactacagtgctacttaataaaaatgtttacagaaagtaatattcttctgaactaggtcacatattgcttataacatttaagaaaaaattactggggtcccggtgcagtggatcacgcctgtaatcccagcactttgggaggctgagaccgagatcgaggccaccctggctaacacggtgaaaccccatctctactaaaagtacaaaaaattagccaggcatggtggcacgtgcctgtagtcccagctactcgggaggctgaggcaagagaatcgcttgaacccgggaggcagaggttgcagtgagccgagatcgcaccactgcactccagcctgggtgacagagagagactccgtctcaaaaatctcaaaaaaaaaaaaatatatattggtggcaaagattctaagtgttcgtaagtaagaattcttacatattaagaggggaataacagattattcgtagagtttagctttgtctctgtgagctagaaagtagtacaaagcagcgggtcaagtgggggagtggggtttcctgaaaggagggagggtttaaaatcttttccagtctggtggctcacgcctgtaatcccagcactttgggaggccgaggtgggcggattacgaggtcaggagattgagaccatcctggctaacacggtgaaaccctgtctgtactaaaaacacaaaaaattaaccgggcatgctggcacgtgcctgtagtcccagctacttggtaggctgaggcaggaaagttgcttgaacccaggaggtggaggttgcagtgagccaagattgcgccactgcactctagcctgggtgacagagtaagactccgtctcaaaaaaaaaattttttttccaaatagtaccaccaactttgccaatatttgaaccttgagactttaaaagaattacttaaccctgctgagtttttccttctataatctgccaaatcaggacatctgtttttaacacatctcaggtattttgaaagataatctatgaaataaaagctaatgtttataaggttaccatgtacctgtaaaatattgttaacattattgtatctgtggtcaatagatggttgtggatgtggaaatatttgagaacagtttcatttccttttgtctggatataaagtttgggcattctttatgaagggagtattgcgtcctctgctgagtttttctatcatcagtctacttgagtaaagaaaactacctccaggtcttgagttaccagtttgcgtataagattacctggttgataatgaactgcccttaaggctctgcaaaagagagccctgtgacttagaagtctccctctggtcatccttctacactggccaataggttcaaaggacgaagggaattggccccgttgaggcatgcctcaacttctagaaagcatgcaagctccccaaaacctatgaattctctgcccaagtggccttgagtctacttccagggcctgagtaagtgcatcccaggccctgttttctgaaaccagagcacattgctcctatatatagtgctaggttcaagggtggctaaagggcagttgttcgtgaaggcatgaggatggatcttgatgtgtgaaactctcacagtgtggcccaatattgagctcaaggataggaagagagacaaaaagtggggtgtgtcaggatctgaagactgggtactagctctctccataccacatactcttccaggctcattttagagatttcctcagctactaaacttgacatggctgagaggttgttatggtatacagttgcaaagatgagaagacaccttatttatcagtttgcttggccgatttataatttaagaaattttaacagattgtataagagtctttatttgaatttttgccccagggactgtaatttggggagtatcttgaaattcccattgtggtttcagtttagaaccttttgtatcgtccactggtgtctctaattaagaaccctgcaatacagtgggctctattataaatagtacacatttatctctgtaaatttcaaatcctgttaattgatattatccttattccccaaaccacattttaatttgttgtagtttttaaaattcattatgatttcaagaaactttatgtggaaatcatataaattatctcaaataatcattccaaagaacatgtatagcatagcacttaaaatatttctttttgtgctctagaaatgaattttttttgagacggagtctcgctctgtcgcccaggcttgagtgcagtggtgtattctcagctcactgcaacctccgacccccgggtccaagcaattctcctgcctcagcctcccgagtaactgggattacaggcacccaccaccacacccggctgatttttgtagttttagtagagacggggtttcaccatggtggccaggctggtctcaaactcctgacctctggtgatcgggccaccttggcctcccaaagtgctgggattactggtgtgagccaccatgccctgcctagaaatgtttttatatgtataataccaaaaagagccacactgaaactcttctctttttttttgagatggagtctcgctctgttgccaggctggagtgcagtggcacgatctcggctcaccgcaacctccgtctgccaggttcaagcgattctcctccctcagcctccggagtagctgggattacaggcatgcgccaccatgcccggctaattttgtatttttagtagagacaggatttctccatgttggtcaggctggtctcaatctcttgacctcgtgatctgcctgcctcggcctgccaaagtgctgggattacaagcgtgagccaccacgcccagcctgaaactgttttcttgattctgtgattgctccatgtatatcttctcctcatatttatattgtatatacagttatatgtagtgtggtattgagaatgtataacttttcttaagaagatgtgaacctaatggaaaagagattttaaaattctaataagggcgaaatacagcatcttgtgctgtaagaattacattcatacataatatggacttcagagccagtcactatttgaccctcaaaagcacagattgagtcatatataatcttcaaaacatagtccagcatcgtttgtcgaaggtatgtatggcatctcttttgtaagttaagtatgccatgtcttgcagattacttgtaaaattcttacctaaaaagctgttaattttatattgcattctcccttttaaattatatttaaaattaccaaagttgtataccacctttgagttctaatttcaatattgccaataggatacagttgtgttttgcttgaatagttaaatggtaaaattgtatctttctgacaggatttaaaataaatatagtaaccccataaccagggcctatgaaaacttaatctgtgggtgtcaaaatgtattttacttgccatgaaattgctgcagttaagttgacacatatgtatatgtcatacatggcaatcaacaaatatgattcgtagatattttgtttggttgtcattaattttttcatccttgctgaaagtacacttaataacctttgaggaaatctaatgcatttatcactgaatcagtgatttcttttttcacctattggtgttgaacaaatagcacattaggaagcacatagatttatatgtggtttaaaaacaatgtaaaaagcattttgtttatttgtatttgtattttgagatgtagtttcatcctgtcgcccaggctggagtgcagtggtgtgatttcggctcactgcaacctccagctcccaggttcaagcagttctcctgcctcagcctcccgagtagttgggactacaggcgtgtgccaccatgtccagctgatttttctatatttttaattagagacaggggttcatcatgttggctaggctggtctcaaacgcctgacctcaagtgatccgccagcctcagcctcccaaagtgctgggattacaggcatgagccactgcaccctgccgtaaaaagcattttctaagtcagttaactcagcatctatgatccaaaggctattcttacggaagacctttagaactctttattgcttaattctatacaccataaatgttgtgaaaataaaagaagcctcgtaagggaaaaggtagcttatgattgtgctctaataaagcctgacattaattatgacatgggaaatggaaggtctattagttataattataattacaggaatgcaatttcaactgcctaatatttaagataaaaaatgcaaaatagtatgttagtagagtataaatttttattcaggagaaaagaaaaagacttcaatcagaagacagtgaggaaacaagaaatagatatttagggctagcttaatgaaccagtacagtatgatcatgattgtatcatgatactaggttctaaaagatccaatccaatccatctattattgtccctttccttctcttctctagcctattatgctgcataaagcagtacacattttttgttgttgttggttggttgtttttgtctaaatccaacatgatattttttttcatgcccttatggtcaaatgcccacataagaagtgttaaatacacattgagtgcttcatctggagtgcgtcatggagattcccgtagaaagtatcctattttcttagagtcaagactgttttctcattttcatgaccacatatgaggttttgcaaattcagaatgtccagtgacgcaaatattttagatgtttatagcaatatattttattagagctgaaagtgttaggtggttggttgatattttgctttttttgtttcattttattttactttttgatatcttacagtagatttttttagggagtagtgagcacatgaaactaaactttgactttagagaatatcagcacacaatgttcacatggtaatttcactctcaggaatttattctaagaaatagtgaaagatgcatagtgaatgtttgagagagacagaaagcaaaatattaaaaatatataataggtgaacggtaaagtaagttatgggtacttgtaaaagaaatattatgcagccattagaagtcagatttttgaaaaatatttaatgaaatgagactactgagtttttaaaagtatgcaaggcataactcatgcaaattaagagccagtacagaaataccttggctatatataggtggtgatattataggtgatattttgtatctgtgaagtattaatattttatattttaacaatgcttatgtgctgctttcctaatcaaacagaatgagtatttaaaaaaaaaaatcagtcgggccaggcgcggtggctcatgcctgtaatcccagcactttgggagggcgaggtgggcggatcacgaggtcaggagatcaagaccacggtgaaaccccgtctctactaaaaaaaatacaaaaaattagccgggcgcagtggcgggtccctgtagtcccagctactctggaggctgaggcaggagaatggtgtgaaccagggaggtgtagcttgcagtgagctgagatcgcgccaccgcactccagcctgggcagcagagcgagactctgtctcaaaaaaaaaaaaaaaatcaattaatgtatagttgaagaagagaagtgtccaaactcatcacgtcagtcctataagtgaaaacaagtaaatgatgttatagtctcacacgttgtaagcgtaaatgactttctattggtttgtgtctagtactgccttagaggagggagggaaaatgatgccttacttagtgggattcatgttcaccttgcacagtgcttgcaatgctaccattagggttttattcctttgcacattgcagtgtattaaaaatcttaactcagtagttggttggaggagtaatgtacattaataaggtgtttttagccctgaagacctattctgttatcctaataggtttaaacaatgcttctcggccatgtggtggagcaacttaatcagagtagggaatgaagagagggaaagaagaactttcaaaggcaagaggaagatagctaaaataagaaaataaaggacaatgctgcatactttgagcttagagagagcaggaaataaaagcagagggtagaggtgagaactcaacatcatatgtttgccgaagaaacggtttttgcatttttaaattgtgtttcttaaggccactcctgctgctactcatgaggccttttttcaatttggaggcacgtaactctttgacagcaaatgttgttcgtgctattttaaactgggaagttgacacaaataaatgtttcatagaattctaaatcctgttatcatgaaagctcttgaagttcacctacttcaaacttctccacacccaaattttacagataaatatctgaggttcatccaaatgaagtaatttaccatcagttacagatatattgtgaagcagccaaaactaaaattaggattttctaattcttagtttagtgaagagttcatgatttgtctttctacataattgttcagattaaagggaaatactgagtgtttttgtatggttttcgaaggatcttcatgatccagggcatctgcttgaagatacgaggtgtgctttcactaatttgggaggagcacatttcacattaaatagtgcccacattttactctaaatgttaggtgttcaccgcagtgaggtagcaaaatagagcaattcaacgatataaattatgaagatgcattctgctttcttttaaaaaatataccacgagcattcttaagaactgagattatcaaagaagtgatcttttataatagctcttttgaaaaagactgaaaaataatgagaagaaaaagtggctaattaatggcccttccaagctctaagtccttgattgcatgaacatagagtttgagtcttctcattggacctcgctctttctttcttaatgcccttgatggctcagtggcttacacttcaccttcagctgtgcttttcagaccattgtcagctgaatccatttttcacaagtaagcttatgagggactacaggatctcaaatcgatgtaaagaaagctgttgttgaggaatagggtgctttttccattcttcattttattttattttatttttttaattttttttttgagacagagtttcactcttgttgccccggctggagtacaatggcacgatctcagctcaccacaacctccgcctccctgattcaaatgattctcctgcctcagcctcctgagtagctgggatcacaggcgtgcgccaccaccatgcccggctaattttgtatttttagtagagacggagtttctccgtgttggtcatgctggtctcaaacttccgaccttaggtgatccgcccgcctcagcctcccagaatgctgggataacaggtgtgagccactgtggctggcccattcttcatttaaaatccatccattattcaccccaacaacccctcccaggctcctcatatacttccttattaccctattagggctttgataaaagccagtagaaaagcctgtaaatttagagaacggttatctgtccttagcacatcgaaaaattatgtgtaggcagaaaaatgatgaaataaatactgaaaaaatatttaccttatgttaaatacgttaaaactggaatatgtttaactttcatctgtcagagctgacaaatctatctgctattcacataggcccaagctggcactttaatcaagaaatttaaatactcttgggtttctgaaatggcaagagaggaatgtttttatattgtaaatgttattctatgttttgctgtgttggtggatactcatcctaatcaaatagtaggaaaagtagtgaagtaattcctaatgctgcctgtagtagtaagcattgcttgggcttccccttgcagagtttataatatggtttgaaagtgaaacttgtaggattaaataattgggtaatggagcaagaacaacatggttattttctgcatccatataaaaatataaatgtgtagtgttttataggtttggagatgacatgtcagagcctcaatcaactgactaaacttgcacaaaacttaagaaaaaaataacaacattcagagggctaaaatatcccagtcatttatttctaaactattactattgcatttattactactactcatctagcaatatctcagaaattgtgtcatcaggatattttaccttaaaaaacaatttattgctatttacttacaagatgagatacgtgttctagggaaactaacctcatacatattttccaatacacttttctttcatcctttctgaacaattggggcacacataagcaaccaaaaatattatccaggaaacagaaagtatgcagtgattacaaaaaggaaagctgttgaaagacactaattaaagtcagatggaacacagggagtagaaataaaggtaactgatatttattttgaatattcaaggcttaccataaactagcaggcttcattatttccaaaatggaaagcccatgatcaataatttctccctcttgaacattctatgtgtgtgtgtcttgttttgttttggctgatgtgttttaaagagatagggtctcgctgtcttgcccaggtaagttgctaactcttggcctcaagcaattctccctcctcagcctcactgtagttgggattacaggtgcatgccaccactgtctgaacattccaatgtcacttactattcagtgttttcacattgaagacattattttatcttagttattttttaaaaattgtattattgctgggattctaattaggcagctaaggaggaaaggaagtagaatagtatttttctattcatattccctttgaaagtatggaagtgtcaccaagttgttacgaatgtatgccttcttctcttctcagcaaccacaacagtctatctcaaggcccgcctccctcttatatagttatagaaggcctagaattataaaaaccacaatatctaaaactctgaacacctaaacaaattatttcaatatagataatgcatatacttctcaaatcaatctattatgaattttatatccagcccctaataattataaatttataattcatgtattacattgatcagactttaaatatattgaataatggaagttagacaacatattacaattattttaaatatgaaatattacatttgaagatattcattttcagtttgtcatttttatttacatatttttgaaccaccttaaaaagtaattccttagaaaatattgaatatttttaaagccctggaaaaaaagttagcaataaattaataattcggtatacgttcactctttggtgattttcctctgtcccatattttttctgaatggtgggttcatctcccacctgcctatgttaagtattttagttttgagctctaacatactgccataaatttatttattctgtatgactgtattaatcagatattagaaattggaggttgaatatttgtcataatgccataataaataatccttcccaggtttaaaaccaaagactgggcagtttttctgtttatcctcttccttttctgtaggcatggcaaggatctgttgatcagtggtttagagatatacacagggactgtttactgcaacttttttctcacatggcttcaggtcactgaaagaaaaaagtgtttttttccccttcggagtcaaggaacaaagtacaaatggctgataaaacccattccatattcaatactattcaggataggattgactcttcaaaaaatatttccataattgcttatatattgcttcctctccataaaaactctggatatttttaaatattgccatctttagtaatttccagggcagcaatgattatgattccatgaactttggccttttgtgcttgatatgtaacacttccaaaggctaaaccgtggccttattccattacaaaacatcacttgcttatggctacattttctcctgaaacatggcagctcattttttccctcctaactctaaaactattgcttaaagaaattcaagtgtaggatcacttgggaactttaaagaatgagctattgaactttcagaaaatgttaacatcttatctctttctcaatatccaaagataattttcttttacacatccagtgatttgtggactagtagatcacttaatctctgatttttaggtgcttcaattgtgaaaagtgacagtgatgtcttcctaattgattttgttattgcaatagaggtcatagattggcctcacaatttgactttgccttttattgcttagcatgtctcatatgagttttcctcatttcttttggagttaaaattgcaaatctcccaaatcagtactctggcccactatatcagtttttctaagaaatacttaaatatgctctaaatctacagttacagtaagtggcattggctctagtgatttgatttgagagttgagactacagtctggatttactctttatgcattaacacaggccaaatggacagggactgcattttaaggcagtaatggaaggctgaaggctgtcttaaaccaatcataccagttttacccatgactgattgatccctaggggcagagccctgtaagcatttctcttacatgaatggacgctatagagcctggagtttcattcataaaatggagactgaaaggaaacacacacacacacacacacacacacactcactcactctctctggaatgtccatttatacagagctgaagggtgtagtgttccatcagctgctgcttatgccagttgactggaagtaatgattaatgctcattggtcctgcttgcaagtaacctgacactatttatggccttgcagtgttcctaatgtatagtgaatgagaagacaacattctcaaatcagaaacataaacaggaactggtgggtctgaattccattcaaatatgtcatttcagccccacagtgtttgtctaacttggattttacaggcaggaaagggggaagggatggataatctgcttgtgagttgtactagcttggaaaaaggcaattagaagggggtggagtgtgcttttatagggtgggacttttagtttcttttttaataaaacaaccaggatatttaggcccagaactgcttatttcaagtgggtaaagtgaacatacaactgtttttataagtggaactgagatttgaaattaaatgagacagtttaaagatacatgtttggatctctcttctctctctctctctctctctgtgtgtgtgtctttgtgtgtttttgtctgtttcatgaatatgaacaaaagaagggaacatataacattttttaaagtgtttacataactaagtatctgtttttaggtttcgaatatagttttagaatttttacacttaaatgatttctatacttaaatgagttaactaataggtttgaggaaaagagacattttatttcataaaacattttcaactaggatatgaacaacttgaaaaaattttcaaggaatttttatcagattaaatagatggttattgttcttattttgtgtgtgtgtgtgtgtgtgtgtgtgtgtgtgtgtgtatggtttctatttagttgtttctaacaatctggaaaattttacaggagagtaattcaaagataaatatgaaaagtatcaaaaaaaaaaaaccaaaagaacaacaagcatgtgttattgtgattcatttaactattctctttaaaagtatttttcaactctctgttctggtaatttttttttttagtatgtgggtctgtacatttcactgctccatctgtttttcttagtattaaaaaataaaaccactcacttaacatgacactggaaatattatagtaaatcctgggcctgacatccatttacgatttgtgtcatattgagcatgttttgtaaccccttatgcctccagtttcttcatttataaaagggcaaataactctcatcttttagtgtttttgtaacgggtaaatatggttatgtttataaagtcactgataccgtttctagcacataataggggtgcaggcaataataaaggattcccattgacatgattttattttgactagatacttcttcaaagactgctagtcctttattaagatgccattattatttctaataatttaaagtacagtatttggggctagaggataagataaaataagagagacaatactcttaaaacaatcatattgtgctagtccagcaagagaaacagtcttgctgaacttctttttttttttttttattatactttaagttttagggtacatgtgcacattgtgcaggttagttacatatgtatacatgtgccatgctggtgcgctgcacccactaactcgtcatctagcattaggtatatctacccaatgctatccctcccccgtccccccaccccaccacagtccccagagtgtgatattcctcttcctgcgtccatgtgatctcattgttcagttcccacctatgagtgataatatgcggtgtttggttttttgttcttgtttactgagaatgatgatttccaatttcatccatgtccctacaaaggacatgaactcatcattttttatggctgcatagtattccatgatgtatatgtgccacattttcttaatccagtctatcattgttggacatttgggttggttccaagtctttgctattgtgaataatgccgcaataaacatacttgtgcatgtgtctttatagcagcatgatttataggaaacaacaggtgctggagaggatgtggagaaataggaacacttttacactgttggtgggactgtaaactagttcaaccattgtggaagtcagtgtggcaattcctcagggatctagaactagaaataccatttgacccagccatcccattactgggtatatacccaaatgaacttcttactagtattattcatatgcaaagcaaatagaaaaagttatctgaatattgtggtgatccaaggagagatgaaaacaagaggacaaagctgttcatggtatgttttttttcaaatcatgtagtttccagcaagagagaaatttaaaattgaaattccacattaaaaccactatctcttcagaattttgtgtggcccattttggcagctaatggcatcctgtatcatactttctttttctttttcttttttttctgagacagagtctcactcagcctcccaggctggagtgcagtggcatgatctcggctcactgcaagctccgcctcccgggttcacgccattttcctgcctcagcctcccgagtagctgggactactggtgcccgccaccacgcccggctaattttttgtgttttcagtagagacggggtttcaccgtgttagccaggatggtctcgatctcctgacctcatgatccacccaccttggcctcccaaagttctgggattacaggcgtgagccaccgcgcccggcctcatattttcttttaaacctctgttaattgtcagagtatggtagtatgaaataaatactcaaagttggtcaggcgcggtggctcacccctgtaaccccagtactttgggaggccaagacggcagatcacctgaggtcaggagttcaaaaccagcctgacttaagatagtgaaaccctgtctctactaaaagtacaaaattagcagggcatggtggtgcatgcctgtaatcccagctactagggaggctgaggcgggagaatcacttgaacccgggaggcagaggttgcagtgagctgagatcgcaccgttacactccagcctgggcaacaagagcgaaactccgtctcaaaataaataaataaataaataaataaataaataaataaataaatactcaaagttacagttgtgtctatgttttctatcacttcaactttattttaaaatttcagcttagtaagactatcacaggcttgtaaaacttgtaatagtgcgagcctagtagatcatataatctaatgttgtttggatctggtcattatttgtgtggggtattgtccaaaagaaaaccccaggtgcttacaagagaagtttataattgtgtagataaaattctatactgttatttttcgccatgtagccttaaactttcaaaagcacgtaaattcagataactgcgataactgcattatttacttattctacttttactttttctttctttactttacttttacttttttttttttttggacaaggtctggctctgttgcctaggttggagtgcagtagtatgatctgggctcactgcaacctctgcctcctgcgctcaaaccatcctcccatcttagcctcttgagtagctggcactacaggtgtgtgccaccacatccagctaacttttcaagtatttttggtagagatggggtttcaccatattgcccaggctggtcttgaactcctgggctcaatcaatcctcccacctcggcctcccaaagtgccaagattacatgcatgagctactgtgcacagcctactctttttttgagatggagtctcactctgtcacagctggagtgcagtggcgcgatctcggcttactgaaacctccggctcctgggttcaagcgattctcctgcctcagcctcccgagtagctgggatgacaggcacgcgccaccatgcccagctaaattttgtatttttagtagagacaggttttcaccatgttggctagggtggtctcgaacccctgacctcaggcgatccgcccaccttggcctcccaaagtgctaggattacagacgtgagccaccacgtctgacctctacttttctctcttttttttaagattttgcaaatgctattacaagcatattaaaaccatctaaaaattaacatatttctcccccatactcaatcaatagtagattcagtacatccgagctattgtgaagtaagtatctctgcagattttacattatttatattcacagtttacttaaaaccctaaagagaaagatcccatctaagtgtgagtgaggtaatactaaattcatcactcccttgtcaggatttctccagctttgctgccttcttcacatgaggttcagtaactaagatgttacattcatgtgaagttcagtaactaagatgttacattcgcatccagttcagtaactaagatgttacattcacatccagttcagtaactaagatgttacattcacatcaagtttagtaactaagatgttatattcacattgagcttcctaatgaacagcaaataggtcttataaaacttgacttttttgctatcattctcacatgaattcagatatatatgtccttattttggaagataattacttttagacttgttctgcaatagagtggtcatatggtaaaagtaaaaaaaaaaaaattatttccattatcattcattctaggaaactttatgaaataagttttctcaattgagtgcactcaatttgacatgtgacaattggaaaagcaggctaaaagtatggcatatacgtgatggctttgcatttaaacacatctgcataaaactcaggtaatctatgcatccttgtaaacctttggattttaaacataaactatgagcttaccagcaaatgagaagaagtaagcaaacaaaaaatctagtgaagtactaagtttaaaagagataaaatgttggcaagatctgtcactatgctcatctttcttgaatgagattggtgatattaattcttaatacaactcagtattttttacataatagacaaatgtttttgaaaaactagttgaaactcctaggtatgcattgatacacacattttttactgagtatatgataatttcagatatgtgtttacatacacattttggctctggatattttatgcaccaagttttagaaatcatcaatatacaatagacaagtttatgtgcacttgattttgtcatatcaactccacaaggagttagtcaagtgtataatcaatccagctttgcactatatacttataggaaagcaaaaccacattaaaatacaacatcaaacatatttatattttactgagatttctcatttcctctaagagattcaaatgcttaattaagttatacagtcgttattggtagaagaatttaaccaaaagcatcaaatggaaaagacttgtttttctcccttatttagaggttataatatgttataattccagatttacacactatttgatagcagagcaatttcagccagctctgtacagatatttcaggcaactgtggcaaatcttttctctttgccgtggcctgatgtagatccttgaaattttaagcaaactctgccctaaaggagagcctccattctgctatagaggcagcaaatatgcaaatcagagagtgcctagcaattttaaatgtgcaaattcaatactgcactttgtggtcaaacctttggtaaagcttcccaaatcaatattatgtttcccagcatagcttgaaaatgcaaatcaagagacagagaagaaggtaactttttttttttttttttttagtttcttgtctgcgtattttaatttgaagagaactttactgatgttactaaacgtgaaaactaatcaaattagatagtttggggtgttagtttattattcttcttaacttccgctacattgattagtgcattaaaatgacaacagggctttgttgctttgaatttttacagcatattagatcagctttcatcaccatgaactcatctgtaacaaattataggcagtttaatttctgtaagctgatttggccagtactaatatgtcatagagcattttgatccacaagttttgaaacaaataaaattctttgtcctaaattaaatttacataatttaatttttagatttaatttaaaacttttaaaaccagagcgctttaggagctaacatgagggggtaatactgtaaaaagaagctcaaaagaggtacccccggccgggcgcggtgactcatgcctgtaatcccagcactttgggaggccgaggcgggtggattacttgaggtcaggagttcgagaccagcctggtcaacatggtgaaaccccgtctctactaaaaatacaaaaaattagccaggcatgctggcgggagcctgtagtcccagctactcaggaggctgaggcaggagaatggcctgagccgggaggcggagcttgcagtgagctgagatcacggcactgcactccagcctgggcgacagagcgagactctgtctcaaaaaaaaaaaaaaaaaaaaaaaagaggtacccccaaatagttaaagcatctactggagagtctggcttaaaccttataagtttataatgaattttattgtattttagatatcatagattaatagatagatttgtgaaaaatattccaaaatagatacactaataatcaacaaatcagtcatctcatataatttaagaacagcagagtaagataacaaatgtaacttatttagatatataattatttttagttttaagtactgtggttaaagtactcagtttaaatacttgtgaggatcacttaaaaatagtgttattaataataagtcccatatggtgaattcttacagtgtgcagatactgtgcgaaatgttgcacataacttactccacgtggtcctcccaacaacccttttaaggatgtcattattattattattcccactttacagatgaggaagttgggagttagagatgttaaataacaacaaaatgtcatactcccatgcaatgtcagaactgagattcaaaatcagttctatcagatgacaaggtgcctgtttataaccattgtgctgtacttgtactaatgatccttaaactataatctgtggatgcataataggacagtgtgaatatgctgtcatcttaatatttttgcatgagttaaactacagcttgttacggttgttgaactttgtacattttattcgtgaagaaacagaactgaatgcatatgcaatgcctccttcctctgccacaaaacatttgcctttgaagtcgccgcttagctagtttggatcatagtcaagcatttaacaaaagttaaaatgtaatgccaaacttcattggttggattttttattagataaggtagaaatgaaagcagcaggcaatttaattagcagtaatttttctgggcaagtcattactttgatgaacttcagagcaatgtttatggctcctaattaaccatgttagtcatttgattgaataatcactttggaaatgtttctacaatttgattagagtctgacccactctgatagtcataaattaactgatatcacttaaggataacatgactttacttactttatggggataatctccccttagccatattttttcaggcttctctggactgtataaaggacaccaattttaagtatagaccagatttaaacaatgctagccaagtgtatccattttaagagctagatgttaattttatttacactagagtataaatagtaacagcaattggcaaaaacacagtcgtattccatatatttctaaattgccatccattgcttttttgagttcacaagttgggcctttggaagtgtaatggagattctggcattaaccttattatatgttattaatttattatgaattttaaatcagtatatcttaaatatcatagattagaatttattaagaatgttataaagtaaatatagcaataaacaaatcagccatttgaatagagatggtattagtgaaattatccatcagatctcaaatttgatgtcaaatatctagttttccagggttatgctaattttgtcatatgttaaaacacttttataaggtgttctttgacattaaatagtgaatttctcagaaatgtttgcacttcctttctccctccttttctcccactctgggaaggaaagactgcatttagtcacacttatatgtaatagagtttagcctatctgttttcctctggctgcctccagagtcagccagctgtttttatagccgcaatccaggtgtgcagcagtcaataaaagtattttgtggcagggtgtcaacattagttcaacaaaatgcttgcctcaaagcagctgctgagctgatggcagagttattaacactgtcccttccagtcccagctgctttaagggaccttacgtctgggaataaatcaaaatagcattaaaaattaatttgaagtaccattggttaagaagttgggctaaaatggattgctaactatttggtaacccaaaagattaactatactgcaaccctattataaatgcagatatcaggaaacagtgttaactctgtcttttatatggtcagaattatatgcttcataatacttcatatgaagaaggcatagtataatagcataataaaacttttgataatacattttacagtattttcaacttgaaagcttctaaatatttccaatgttgctatattcatagaatgctatgggattatacaaatttatttgctaaatgtcctgatgcatatttaaaacttgtgaccctgtttcaaggacaccatctcattcatgtgggttgctgtttgagctgacttttagcaaggtttatttgggtaaaactttgaattcaccttcctattcaagagaatcagcattcaccaagatatatactcttcattctttcatttcatgtgtgggccctgcctgaaatgttgattatatgttgacatgttccccacattggaacctgtgtccgtttctgtatcttctctgtctgcaccctgtccattgataaccgcagcgtttcagctccagactctttttgaccaatattgtttcctctttcagaagtgcctagctgccactccatttatatgaggcaagaaggcttcctggctcatcccagcagaacagaagttaagttgtccaccactgaaattccgtgtaaataccgttcagaataatcagacatcccaaatatgacgtcatttaattaatcattatattatttgggaaaaatcatttatgttccctaagcaattgttttaagactatctccaaagtaaaaagaagatgtttcaagtagtggtatcttgttgttaacatgagtcatatgcgtagaaacaactgaaaagtggatttctgtgttcttttttgccaacaaccacatccttttaaaatagaacatatgctttatagattagcccactttactactactgaaatgtatctttgaggaatatttggttttgcttttacagacctagtcatagttttggagtaaaatgccatcgatttaaaggttttcacctttaaatgttctggattttatatttttggacaaataatttatatgaatgagatttcacataggaggcctagagaaagagttttctcatagacaggcttgtggtaaccgtggtaggaaagctttgcctgtaaaggactttgatacctaaaaagtaatggtaaaaatgatttcgtctggatataatcctcaataaaggatttctgaaatatgtgcatggttcctaacctaaacactctacatctctttaataggattgacttggatgcattcttttaggctaggtctaatattggttattttgtgtaaatgatattagtagaattttaaagggtagtatgagatggtaaatgtaaaatatttgaaattaaaagttttgcacaaatgcaatgtaattattgttgcttctgttgttagtattatatacccaccataaagaccaatacatttgagaaataaaagtaaactctatgaaatttattcctggtaatcacagatagcaacaacgaaagttcacagtgaaggatatttgagagaggacattattatgaaaagctgttgatttattttgcatttttttctgtggacttaccttacagcaaaaaaaaaaaaaaaaaaagggaaactttttttttcctcttatcttgctaattgagtacaggaaggttaacccatctaaatatttttacaagaaagtaagaggataaaataaatctgtctcagagcatcagactaataatataatgtgaataccagtaattcaccttgctttctcactttttcattgaacaataaaatttagatgaatctaaaaaaggagacgatacgttataaatccttgccaatgtttaggtgagctctggcttgagttaacaatgtaaataactaacttttatatttcactgtgtactaggcatcactctaaactacagcaaccctataacatgataagtggtgttactgtcatcccatttaatagatgaggaaactgaggcacagaggttaaataatgtgtccagggctcaaggaactgaaaggtggtggcagagtcattttctatcacaatttttatgttaaatggttatattttaagtgtttgtgagcttcatttctatcatgaataaatgtattcctttttcatccacaggctgtatgtttgaaaagggccccaggcagttttatgatgacacctgtgttgtcccagaaaaattcgatggtaggttttacactttgcctcaagttctgatttttttaaagatggagtgattaccttcgcttcttctgaaaacagtggacatccctacttaaagattcctatgcacataattcatcatgcacttaattttagccaacgttgacctattacaatttatctcttccttgccccagtaggaaaccttttcttttgtgttaggagggagttcatttttggagaaatagacaaagagcatcattcttgctgagctttgtgtagcgtaagagggggctttccattgccctgctgagcacatgcagcttgttattcgagatttattgaaagctgatcctgtaattaacaaagcagagcagaaaacgtgctgctgtggatggaccgatgactaacgcggcctctcttctttcattgttcatggaaagatgcattatggaacacaggaacaacataactgcccatttagttagtgattgttagtccctttttttttttttttttaactggggaagatgtatgttactaatgtagcatgactttgtaattgcttaaaagggagttaggaaagcattacctttttaatatcacttgctattgcaatgcagaggtctcagatgttagaaaagggtgtcaagttaaattgaattttttttttgacaaaggtgacaaaagttggcatcttgaggaagcttgggtaaaaagtaaacagttaattgatttagtggttcttcagagtggttttcatatttcctgctttgatcgtttgacaggaaaccagcaggggccctgtgattcactgattgcacaaactttgggggtcatggctataatgacttgggtgctctctgaagttttaaattgtcattatttaaacagcaatgtacatgctcagattgcttttcaatttctaattagttgcttggagactaccccatgttcccgagctttgtgctacccttacccttctcagaagggctggtaagtctagggaagatctgcttctttatcctcctttagatttctaaattcattcaaggtcaaaaaaaaaattataggaatcacatttttggttttattctacaacagatgttagctttaagctttgcatttcagaggggtgagccgtactatttagcaacattagcagagcatcagcattcttaaaatatagcattttctcttagacaaagtatataaagcctcttactcttggaatgaccttcattagtttctttcgtgtttggtgagcttcatatttgcagagatcttgaaaattagtaagggcatataagaaagaaaaatatctcaaaattatggacagaattacaatataatctgacaggccaaagtcacactaatatttagggaacaagctgccttgattatttattcccttcgacttttaaatactcttcaattttacactaataaaacattttttggaagatagtatttgccttgtattttataagtaatgtagaacaagaagaaagaaaaatgagggggttattttttcactgtacatggtcagtgtgatcagtcacatttataggcagaagcaatatagagactataaaatgtaacagtgtttcactctatctgcataattactcagttactcccataaaaaaaacattgtaaatctcagaaggaaaaactgagataaataaaactgtcattgaaatcgatatgaagatacacttctatattatcatgttaagaccaaaacaacataatgattttagcagctattgactcacacattttatattttggtttaggtttttcaaatgttgccctttctgtaattattttaagaggtatatgtctctctactgaccataggtaagttttagaaagtgtgcaatttggtctattttataatgcacacttagtatgactacataggcttagatatattttgtctggattgtttctttagcggagaagagcaatttatgcactaacaatgacatacttgcagggccctagacactcaatccccaatgtgagcagttccacctatttttgagacatgtggctggagatggaagtaaataatcagaagtcatgaaactttgtatttttttttgtaaaattaatataactgaccagatttataccagaagcattgcaacatgaacacctttattgctgtgctctatttaacagatttttacactagatatgaatatcaaataaatataacacaaactttttgtgcttaaaaatacatacttacagaaatctctcgtgcatgcatttttaaattggacttttagaaaaaacaatagcaagttaaattcaagtgagtgaagtacaagcaagagataaagaaaaatgagagagaatttttgttaccagttgaaaaagtagtagctttaataggaaggtatatgatgcggtgaaggaagggtagtactacgataatgcagtatgccctgaattacccacaagattttccttatttatataaagtgaagattacttaactcagtttaggatactattaaatttgctttgaaatatttgcattaaaattttcaatagtttttcatgagcaggtcaataagatatttataaattatagtttgcagaatttaatttgtatgaatcaaatgcccagagcttaagattgattattccctcttcagtgttgcctagagcagtgggtaatagcattaacaataaaagcaaagaagtctgattagatacgatggtttttaaagaaatcaatttaaaaaaaaagatagttccacaatatttttgtaagtaaatgatgtgtgtcattcatattgacacaggatttattctgcacctgtgttatatatagttatctgtaagttcgtacagcttgctcatttatattcaaccatttaactattttaaattcctctttaatggtaataatatatttcataaatgcccataaagtggttgattgtggtttaaccatattagtgattgatttaatgtacattttatgtaagatagcatagtattgctaataatagaaacttaaaaatgttttaatttaggagacatcaaacaagagccaggaatgtatcgggaaggacccacataccaacggcgaggatcacttcagctctggcagtttttggtagctcttctggatgacccttcaaattctcattttattgcctggactggtcgaggcatggaatttaaactgattgagcctgaagaggttagtttaatagattttaattaggacactcagacatgttataacataaagaaactgacacatttgattaatataccaaaaatgtattcttaatcatttcaagactttagggaaactttctgaattaaaaagcatgcaaagataaaacatgtctacctttaaaatcaccaatgtattgcgtgttccttccggttgtatacaatcctacaaaattgatgttggagaaaattaaccagagcatgctttgcacctttatttaagaatgtctggcttcagggtttctaaaggagcatctgaattagagaaaagaggcaggagggaggttttatggtccttaggagagaggaacgatgtctgcaaaagtcaactggttgggggatgggtgaattattctttcaaattagcaatcattatttggacaacttggattttgtcatgagggttggagaggagcatttagaggccaaagttatgttcaaaagaagattggggaaaaacagctgtggcggataaagggatgcaagggcaacagtggaaaattctcagcccttaagtgtctcttacaagacacaggcctggtagaaacattttcctttgtccgtgacacttgttccaagtcagctggactggcatactccattggaaggttgggatgaagtttaaaatgttgccatagcacataaaaaattactaaaataagaagagcctggacagagataatactgtacagagaaatggaggacaccttcaactaacttcaattgtcccctccttcccactccccacatacaaatggagtatttccatgaagaatttctcagttcagtttttattcttcccagaactagctttaggcttaaggctactattgttcctgtagcataactcatcaatagcattttggactgctgatggaaaggtgaagttaatatcaaattgttgtgtcttcattactaaagatactttctctgctactattaaaattgactttagtttatatcagccaaaaaagcaatggaagatttttagctaccatacctctaactgattatattaggtattgaatctaaacacctcagtaatattgaaaaattcagtaagtttaaaaaatgtttgaacccaaagtgattttcatatacactgaacatccacacccttgactactgggtccatcatcttgaattttctgtctttattaaaccacgtattcaactataatcagataatatgccctaatttgatgcccagaagataagtttacataacttcttgaaatttaagagattatctgactcgagaatgtactgaaagtatgaaataaaaggcactggttagaacagtcaagtctccttcagtttatatcaatactttagtaacactagagggttagttttgcagtatctcccttgccccacatcaagcacgcacacacagaagactcaatgtcagtatttgaaaattctcattatctaggatgacgtttgggtgtttgaatgctgtagtgtgtttaaaattaacttagctgtcaaagaagattagttttttcatagatactctcacatgatgtaagtgaaagaaccacaaaaatgttaagcactaacaaattgagactagaagcatttaacaaagtaatttgaaagccctttcgcatgatgggagtgtgtgctcttcacctcatggaagatgttaataatcactgcaagagttggttcatgctggaactgagcactttctacagggatttgtatcagttaaacagttatttcccttcacctgtgattaaaatgaactgagcagaggtttttgttgttgttcctgccatatatttgttaagatagggaacattactgaattatgccagtatttcttgatccactcagaagaagaaaaattcttttgcaaatgattaagctttttatatagcaactgttgacttttatgatgttcagatttgagtaagtaggagatttgactagatgaccattaagtttcatcaaattctgagttactgtgatttttaaatggagggaagaagtagaattacatctgttccatacaacagactgacatttagacaactcttctgtagcagcctcataaagttaaaaagaggctggataattcagagtcagtagagcgtttccaaataataaccaactcaatgggaattgtgcaataagcactgaatgtctcctaaggcttttgttcaaaatgaaacatcccatatctgattgctgcattgctgactgttgcaattacttccatcaggcaatgactgtagggtcttgtttaaatttcttctttggaaagggtttgtgaaatttcttgtctttgtgacctgtggtcaccctgttccctctactgcctagcagctcattgggtgcctgtgtcagcacagtccgtgaaagatgtctctgaagccatcttattggaattactgatgggttccatttctttatatttcatcttgcattttaaaatgatattgagtgagactccagacctgcacagattatctgctcagtgtgtttagggtaactttagaaaacgcataatctttaacatgtctttttcttagatatttgagataatgaaatactatttttgaattagtcatgtctcctagggaattgttccaggaaacaatttttttttttttttttttttgagatggaatctcactctgtcacccaggctggagtgcagtggtgcgaccttggctcactgcaatctctgcctcccgggttcaagtgattctcctgcctcagcctccccagtagctgggacttcaggtgtgcacccccacacccagctaatttttgtatttttagtagggacggggtttcactatgttggccagggtggtcttgaactcctgacctcaggtgatctgcccacctcagcctcccagagtgctaggattacaggtgtgagccactgtgcccggccgggaaacaattattaacatagaaagtcgtctgtaagactcagtataaaagtcttttgatgaaattgaagcttgttgagctggaagagttaccaggaagtctgatagccaggccctgattgttgttatcaggttcagtgttacatattcaagcgtgatattttaaaataagttgattaatgcttgaactattacattatcttatttaatttatttgacaataagggtgaatgccatagtgctatcatctttttactctcttcactaacaactcaagttttcatttgaaggcgtatataaggaagtcactggaagttttcccaccatttttcccactccatattggaaactatgccttgactttgagtggtgttggatatggtggcgattggtcggtcgtatgtgaaggctgaatgaactttcttagttggtggttggcctacctggcctggaattatttacgctgttaatttataacttttgtcttgtctgcatctcttaagcatattgctctctcccatttacctcaactttatgaggaatatgacactaaaacaactctaagactacattttattgtttttaaatgtccactaatacccatgatgctgagaatgaactggcatgataagtatcaaactctgtggtatttttaaaaatcatatttctctctccagagacctccacaacattgtattaaagttgttgtgagtatgtgagtattttattttctaggtgcatcctggtgagtttctagaaaataatcctttataaatgaataaggattcagaaattattgtttaaggagatactaatactttattttcacatcccctccaggtttgcatatagttcggctgctatgcctattaaaggttcactgatgtccatagttaggtttttgaatgaaatattctttagaaaatgctttcatttcttattgcctccccccagcgcccccacccccgcttcaattcactattgctcagaagatttacattaaaatgaagtttatctttgggaaattgagatgttcctgccactgtgattgtctgctgggatatatgatgttgtccctgttacatcgcatctctctactcttaaaaaacatactgatgcatgtcattaaagtactttatttcttcattcagagaataaaaattactgagagggaaaatagctaggatcggtatttctaaaggaaaaaaaaaacctggagaaaggttattactaataaagcaaagagagacagaatgatctctttgaaaagcaatctattttagtatatatgacatagcaacaacttggaattttatggaaatgaaggcgctccctagccctattagataatgtcctcttggggttgcctaggtttgcgtggcagctgcagtttcttctcagactaataaaaagtggaaattaatgagagagtgactttagctggggtaggaaaagcaagctacactattctgtatactgctttggctagcctggggtggtgatgaggtagggatatatatacattgaggagagaggattttttttaaagctctattgaaaaactcttagatacattgctcctccaaagccacataataaaaagctctgagtttttttattaaacaacagagtagacattctgctttagagatttttgtttgtggactcatatacatggtgaccttttccacttccttcttatttttagcatccaattaccgttctctaaatgaatgcttaattcttcagtttggtattacccacagttttattcggctgctgctttaggcaataaaaagtatttgcagttcggtttattaatttgtgtactgtttcctctgctacacacattgtcacttgttcactctttcatatagtattgagcagggtatcttttttcctttggcttatcataacctcagtaaaacacctttacaaggagatcactaagctgctctttatctatagtttttgtctgaaaaaccaagaaggataaaacagacagtatatctcagaatgaaaaacgtgcctcattttggtgaactgtagcctgttcattcctgttgtaagaacatttccttatttccatttaattttgtattcaaaacaatagtgacaaataattctattgtggtgttttagaaggatcactgcacgcctggtttaaaatgcaaaccaggccaggcgcagtggcttactcctgtaatcccaacacttttggaggccaaggtgggtggaccacctgaggtcaggagttcgagaccagcctggccaacatggtgaaaccccacctctactaaaaatacaaaaattagccgggcgtggtggggcccacctgtaatcccacctactcagaaggctgaggcaggagaattgcttgaacacaggaggcggaggttgcagtgagccaagttcgcgccactgcactcccagcctgggtgacagagcaagactctgtttcaaaaaaaaaaaaaaaagcaaaccaggagacaggaaatccagattacgatagctcttgctactttacttatatccttgagttggacatttttgtgggtttggaagtaattaattaaataatttttatgaaatatgctgataagttaatacttaacactacaatgtaattctgtttcgcggcaggtggcccgacgttggggcattcagaaaaacaggccagctatgaactatgataaacttagccgttcactccgctattactatgagaaaggaattatgcaaaaggtgagcagctaatacagcattaaaattcattgaaatgttgcacattaatctgaacatcatactttaaacgccacatatcattgcattgctgaagcgagtttttcactcattttaacaaatgcttagctcttggttttggtattacaagcctttctatgtataaatgcctagacattgtagacaaatgtgtagtgatattgtatacagaataataggctttctggaaggtcctactttgctgcacatggttaaaaaagattgttttagtattaatagcacatctgtcttcagaagtttttattgcacattgtctacaattatataattttggaatgcttttgtttatagcaataaagaatctttagaataaatttgtacttttttcttgttttgattcttaaaacagacatttctttttctcatttgtgaaaacattttcttccttgcctcaaatcttgcctagttttatcatctgatagtttgacatcctaaaccattcattaaaaatgaacatttgatcttatttggtttgtggaagttcaatatattttatttcaaatgagcttcccataatatttgaaagtagctttttgtttgtttgtttgttttgagacagattctagctctgtcgcctagggtagagtgcagtggcgtgatcttggttcactgcaacctcagtcccccaggttcaagcagttctcctgcctcagcctcctaagttgctgggactacaggtgcgcaccaccacacccagctaatttttgtgttcttagaagagatggcgtttcgccatattggccaggctggtcttgaactcctgacctcaggtgatctgcctgccttggcctccaaggggctaggattacaagcatgagccaatgcacccagccaagagtagctttttaaaaaagagtagagaaaaaacaagtgaattacacttaaaataaaatacaacatttttgaagaaaggaataaataaatgaatgaagataaaacgtggatatttgtttttattacaccctttagctttgcaagtgtacagaaatctaattgctttgactgtgaaccaagtttatgatttacctattgtgaacgttacagttttattttgtatcatttgtttattttagggtttgtaaacatagttacatgttatagattgtggcacatttttatgtcaccatagttttacccagaaaaactagaccagttgctacatgaagcttattagagcagcgaaaaatagcactgttgactttcctagaacattgtctattgacaagaggcatattatctcagtgccctagaatttgctggctcagacgttagaacttccatgatccttaaaagaaaaggctgacttcgattttcagttgcttcctgttttctcaatcatgccttcaaaatgtataacagtttactacctgctcctcctgtctttttcatctcaaccctggggtcatttctaattcctccctttctctcacctacctttttgtagtaagatccttcaaatacattccattcctttcttttcaccaccatcttcctaatgcgggggcacattgcctgggctgtcacagatggtgctcagcagtgtccccgggcagtattgcacagcagtaacagataaggcagtcaggaattaggtttgaatgctagcctctcaccagattacattcttgaacagattattttcctagtaaatggtgatattcttgcctcattaaagttgctgtgattattaaatgaaataatgtacttgagatactttacattgtaactggcacaatgtaaagtatatctgaactcctgggctccagcaatcctcctgcctcagcctcctgagtagctggaactacaggtttgcatcactgcacccagctaatcacattctcggatatgtaccattctgatgttcaagtaaattctagtatagtcattcagaggaaaactatgctgtccttttttaaatagcaaaaactatgatgttgaattatatattttaacatgtaggagaaaatatttatatggctatatttgttcactaacttaaaactttgtgggcatatgtggtgtatataatatagaaaattagaagattagagaaaaataaaaataacttacatctgaacatgttaaaaaaattgaaaactggtaattaattttagtaatacggaagaagtaagaaacaatggaacagtgtatgtttaccttacagacaatgcctatgtgtacttctatttcaaaattaggaaatgcctagaacaatatataccaatatgttaatggtgattatattctggatgatataattatagaccctttgttttaacttaattgataatttctaatttatccttcagtatccccatattacttctgaaattttaagagataaaacataatttgaatatccagccattgaaagcacagctctaaagctatctccttgtttacttttgatttatctccctggaaaaattcctgttttttctgtctgtctcagtgttgcattttggctatacttaatgtacagcattttgcacgttagtacttctgttactcataatggaagacatcattccccttggttggttatcatcccttgttctaaactcagtagcatttaacatagtccagcaaatgaagtagtagccctaaaaatgtttattcaaaagcaatacagaaggaagcagtgaggaaaggcagagtccttgagagattgcataagcttgattgcatgttacacattttaattcatttattacataatttttaagtatagccagtagcaacccgtcaaaggaagtccagtacttaaagcaaatgtatcttcctccacagccccaaacaaaacaaagcacattataaaacactcagaggtatgcaggccatttattttattttattttttctccaaatactttgaacaaagaaaaaaataaaggaaaactaggatttactatctcagctttgttcctgatagtgctatttttatgtttatggtcatttcatcatttcacctttaagatcttaattttctttgtatgaaggactaaagtaaataaatgtatgccagactcctctgtttctggcacagtgctctgtgctggagacttccatcccaaccttgcaatgggctttctgaggcgccattcctgtctccatttcacagcaaaggccactgagaggtagtctaagaaacaggtccaaattcataaaaactactaaatgttcattctttcaaacctaggtacattcagattatttgaattctctaaagtggttcctcttacttaaattcagggcaaaagaaacaaaaaatgttctaaatttgaattcagagcagcagcattcattgacaattgttacttttccctcaaagatataacaatactttataacccaggaacacactgttgccccacatcaaaaatcaactagcaaatgccttgttgatatacaggaacatggaggtgttgtgtcaccttcagctttctaaaatctcatacctttacacacacccatacaaagtgactatcaaagttaatagaaagaactgtattcatccacccatccccccaccccgggttttgagagcatctcagcattgtctattaacaagaggcgtattcatctcactcagttgtttataattttctagggaagcattactcttcagaatttaagtttggggtatgtcataccctataaattatgctacttctttattccaggcagttgtcacatttctttttctcatttcctccctgtgcattgtgtattttaaattcctttcacttttttacacctcttacttcaatttgacactttacacacatccttaactctgtctaatgcatcttgccttcatttttaaaagtgatgtacccaggatactgtccttttgatccatctttcatttaaatgaggctgtgtatcctttctttctttctttctttctttctttctttctttctttctttctttcctttctttctttctcccttctttctttctctctcctttctttctttctctctctcttttctttctttctttatttctttcctttctttcttctttcaacacacactgccaaaaaagaaaaaaagtaaagaatccatttattctgtgaatcagtgaattactagtctagtcttattgggaataaagcacatttttcttttaaattttgaatttagtttttctaccatttcagatatgtaatattaagagggacagtgtaccttaaaagtacagatttgtagatactaccttttaaaatgcagaaaaaaagctttcaatatgaaatgcctgcattaaataattgactttttttcaaaacaacgatgtaagtttacctctatattaagacaagcaaattcctgtgcttcctagctatatctggaattaattaattattattcaaggtcaacattttgcatctcccttgactgaactgtagtttattccacaaagtaaagacttttttttttttatgtgtatctgctattagttgtttgcttttttgggccagagttacccatcctttcctgtatattaaaccacgtttttggctttttccttcctgtccttccccatctggcgatggtgaggatgggtttttctcttccatgttatcatcaggtggctggagagagatatgtctacaagtttgtgtgtgatccagaagcccttttctccatggcctttccagataatcagcgtccactgctgaagacagacatggaacgtcacatcaacgaggaggacacagtgcctctttctcactttgatgagagcatggcctacatgccggaagggggctgctgcaacccccacccctacaacgaaggctacgtgtattaacacaagtgacagtcaagcagggcgtttttgcgcttttccttttttctgcaagatacagagaattgctgaatctttgttttatttctgttgtttgtattttatttttaaataataatacacaaaaaggggcttttcctgttgcattattctatggtctgccatggactgtgcactttatttgagggtgggtgggagtaatctaaacatttattctgtgtaacaggaagctaatgggtgaatgggcagagggatttggggattactttttacttaggcttgggatggggtcctacaagttttgagtatgatgaaactatatcatgtctgtttgatttcataacaacataagataatgtttattttatcggggtatctatggtacagttaatttcacgttgtgtaaatatccacttggagactatttgccttgggcattttcccctgtcatttatgagtctctgcaggtgtacaaaaaaaccccaatctactgtaaatggcagtttaattgttagaaatgactgtttttgcaccacttgtaaaaaggtatttagcgattgcatttgctgtttgttgttttattttgctttatatatgacttgcagaggataaccataaaatgggtaattctctctgaagttgaataatcaccatgactgtaaatgaggggcacaattttggactctggcgccaaactgagtcataggccagtagcattacgtgtatctggtgccaccttgctgtttagatacaaatcataccgtcttttaaatattttgaagcccatttcagttaaataatgacatgtcatggtcctttggaatcttcatttaaatgttaaatctggaatcaaaatgaagcaaaaaatatctgtctccttttcactttcttcagtacataaatacattatttaatcaataagaattaactgtactaaatcatgtattatgctgttctagttacagcaaacactctttaagaaaaatatccaatacactaaataggtactatagtaatttttagacatggtacccattgatatgcatttaaaccttttactgctgtgttatgttgataacatatataaatattagataatgctaatgcttctgctgctgtcttttctgtaatattctctttcatgctgaatttactatgaccatttataagcagtgcagttaactacagatagcatttcaggacaaaatagatgactcaaaccatttattgcttaaaaaatagcttacgccatgctatgctataagcagcttttatgcacattgacaaatgaagagtaagcttcagcttgctaaaggaaactgtggaaccttttgtaacttttggtgatatggaaaattatttacaaaccgtcaaagaatatgaggaagttgctgtatgacatagtgctggcactgatattatccatcatctctttttggacacttctgtaaatgtgattggattgtttgaaagaagatttaaagtttcaaagttttttgttctgtttttgctttgcatttggagaaaatattgaaagcagggtatgttgtttcattcaccttgaaaaaaccatgagtaaatggggatatagaatctctgaatagctcgctaaaagattcaagcaagggacatgaattttgttccatctatcaataatatccagaagaacaacttttttaaagagtctatagcaaaaagcaaaaaaaaaaaaaaattctaaacacaaagtcaaaataaacctattgtaaaagcatttcgtgatgagcatgaaaaagattgtttaaagatgatccccccagctacccattttccaaaactacacagatcacagctcatttctctaagtggagcagttatcaagaaacccaaacaccaaaattgctactcttcacatttaatcctacaaaaagtactccaatttcaaaatatgtatgtaacctgcgatttcaatgattgttgttcatatacatcatgtattattttggcccattttgggcctaaaaaagaaaactatgccttaaaaatcagaaccttttctccccactatgcttatgtggccatctacagcacttagaataaaaacagatgttaaaatattcagtgaaagttttattggaaaaaggaattgagatatataattgagatttggtgaaattgaaggagaaaatttaagtgagtctttaaaatatattctgaatgaaaactgtattgaggattcatttttgttccttttttttctttttctcttttctcctttttcttctttttaatagtctagttttagtcagtcagtgaggaagaattgggccatgctaacgttatcacaagagaacaatggcagaaatggtattagttatataatatttaaggacaaactatatgttttgctgttttaacgtagtgactcactgaactaaatacataattgaccaacattaagtgtatttccaatacagaagggttgaaaatattacattataaactcttttgaaaaatgtatctaaaattttttaagttctgttttgattccactttttggttgagtttttatgtttttgttttcaggtagattaataaatctggcagctgatttctgcaagattcttgtgttttgaatttctcattgaattggctactcaaacatagaaatcatttgttaatgatgtaatgtcttctctcagcttttatcttcactgctgtttgctgtctcttgatgatgacatgttaatacccaatagattaattgcaacaaacacttatactcaaataactaagtaaaaataatttttcttgttatgtccatgaaaagtgcttcagaataaaaatccacaagactgacagtgcagaacatttttctcaaatcatgggcggatcttggaggtctagtttcccgtagatgctgtaaccaattaccacaacttcagtaatttacacaaatttatcttatagttctggaggcagaagttcaaaagaagccttaagagactaaaaccaagatgtccttaggtctggttccttctggaggctccaggggagattcttccagctttcacttctagagtctgctgacattccttggctcctggctacatcacttcaatctctgcttccatggtcacatactcttctactatagtcaaatttccttcctgcctcttataaggatgcttgtgattacatttaggggatgctcagataatccaggacaatctctccatctcaagatccttaacttaatgacgtgtgccaagtccctttggctagataattattcataggtcccagggattaggacatggatgtaaggggtgagggcagggctgttattcagaacaccgcacggaggaggaagactgtgtagcaaagactctaattgatttactcaggaacagtggagttctgctgagggatctaggatttgaaagtactagagtttgcttttatttaccactgagatattttccccttattctgcataaataattttgaaaactttctatattaaatttcaactattccactaaaatgtctggtaatcacatcaagcctttagattattcaaatccttccccagcccccaggaaaacactaagtcatgaaacagaaaaacagaaggtatgataataatagtaataacagttaaatcagtggtctaatccagattttattttttaatacatttcttttggtgttaatatgggttactatgtgatcttatcatttgctagtgattattacttattaggtaagaacaatgtgtaaaatatgtctattactcaaaagaacaattgcaaaatgagtcaacttatctttatataaccaggaaagaaatatattgccagaagctacagaattttgccagatgatagggatttctaaaatgagccactttgtctatcatgcagccttttcagagcttgtaatgagaaaacattacagaggagaaggtcatttggatgtttgttacttggaatcctagaaaacaaaaactaaaatttaaaaataagaagtgagtaagctattttccatttgcgatttggtatggagaagagaggaaatagaattattaaaaaaatacaaattgggtaaaagtgatggtggaaaaaatataaagaaggcaaatgtacatattaagcaattctactaagaattggaaaaatcaagtttcaaaaagatggtaatagttgggcatgatactagaaaatttcacccagtttattcagagctcaactagtacttttaggacttctttttttatatacatgagactcactttgacatacttaaaaaaaaaacagtttatggaaagtacagtttaagaggagaatttgattagactaagtggatatctttatagaaatattaatgatttcagaattttcagttacaagtgtatataccgtggctattgtttatggattcatatgtaaggtagggtcttttttgcatatagactccagtattagttactttcattctaaaattatatttatgcttctatggggaagaaaatttttaattcacttggttgtattaaaattatacttacggtttgagaaaacatgctatgaaaatcatgattatagcaaattaaatatgctcaaaatttaaatctaaaataaaagcccagaaactgaaaatattggactgtcgtgatcactctgaaaggtagcacatctaaaactgataaacgtcatctaaatttttgactgtcttctaatcatcgtgtcatttttaatagtttatgaccacagcactcaagtaatgtgtttgcactactttgccatatattattcttttagataatttagataccaggacacctgataaatcctttttgagttctacgttctaatctctgtaaatatcttgtttcacataaatccttcaataaatgtatcatggagaaatttggggaagggaactaactaaattatttcagtgactcccacatgccagacagcacagatatgtgaattatgttactgcctccaaattgcttggttttgtctggtgagaaactgaagctaatggcaaaaccagtatgtcttggtgtcaagatgtcgtggtcacaggcaaatcatgaaccctaccttttggggaacttggacctagctacttttctgatttaatttctaatgacaaaaatatctataataataacagattctgctgaaacacggtgttatttaattttttttcttttttgaatattccttgtagaaaaatctaaaaagaaatcaagcactatttaaacaacagcaacaataaactgagttgttttttaagtgtttttaagcattcagaaatcaaactgattgaagtacctctttgtttctttccattggagatgggtacagcttaatgaagaaacagaaatactaatcaaactcttcagaaagttatatacactgtccccataatttatattattagacaggacttctgaaagtaatagaattttcgggaaacttttaaagcatggaagattcaagtcaaatgattcagaaaaagccaaaaaattgtttttaaaatagaaagtaagactaaaggccgggcgcggtggctcacgcctgtaatcccagcactttgggaggctgaggcaggcagattacgaggtcaggagattgagaccatcttggctaacatggtgaaaccccgtctctagtaaaaatacaaaaaattagctggacatggtggcgggcacctgtagtccctgctactcgggaggctgaggcaggagaatggcgtgaacccgggaggcggagcttgcagtgagccgagatggtgccactgcactccagcctgggcgacagggcgagactctgtctcaaaaaaaaaagaaagaaagaaagaaagaaagtaagtaagactagaaacatagaaattattgtatgaaagagtactgttttaaatgacatttctgcaaaggggactatggcattcttgtacacatttaagtaacattaaaattatttgtcttatagaaagtttaatgtgggaatttaattggcaatgttggtgggaagaaaaaaattaagattacacatgtgacattactttttttatttttatttttctttgagacaggatctcactcagtcacccaggctgcagtttcatgcgaacacggcttactgcagcctttacctcctcccaggctcaagcgatcctcccaccttagcctcccatgtagctgggaccacaggtgtgcaccactattcccagctaatgtctctgtttttttatagaggtgaggtctcacaacttttttgactgttttttgttttttttgtagagatggggtatccccatgttcttatgttgcccaggctggtcttgaactcctggactcaattaatcctcctgacttggcctcccaaagcgctgggattacaggtgtgagccaccatgcctggccattactttttaaactgcaaaatactattctactttcagtgaccacagaactacttttctttattcttaaaaatatttgcaaacattacgttctttaaacaaatatttttatacttaaaaaaactgcagtaaaatgtatatgaaatactactcatcattttaaccagttttaagtgtacaattcagtgtcattaattacattcacagtgttgtgcaaccatcaccattatctatttccaaagtgtttagatttttttattcataaagtattatcaaaaatggtcaaggagaccaggtgcagtggctcatgcttgtaaccccagcaatttgggaggctgagtctggtgaatcgcctgatgtcaggaattagagaccaatttgtccaaaatggcaaaaccctgtctctactaaaaacacaaaaatcagcctggcatgataatcggcacctgtaatcttagctactcaggaggctgaggcaggagaatcacgtgaacccaggaggcagaggttgcagttagctgagattgcaccactgtactccagcctgagtgacagcaagactccatctttaaaaaattgttttttagggtcgagcatggtggctcatgcctgtaatcccagcactttgggaggctggggcgggtggattgcctgaggtcaggagttcaagaccagcctggccaacatggtgaaatcccgtctctactaaaaatacaaaaaattagctgggcacggtggcaggcgcctgtaatctcagctacttgggaggctgaggcaggagaatcacttgaacctgagagatggaggttgccgagagccgagatcgcaccactgcactccagcctgagcagcaagagtgaaactctgtctcaaaaaaaaaaaagaaaaaaaatgtaagtaaaaataaattttaaaaatggtcaaagaaatgctttttcatatattacaattagtaatttaaacatgcaaatttatgctttctaataatttaagttaattgtagtttacttactaataggttgttcttgattttatattgtagtttaatagctttatttattattattattacttttttttttttttgagacggagtcttgctgtgtcacccaggctgtagtgccatggtgagatcttggctaactgcaacgtctgcctcctggattcaagcaattctctgcctcagcctcccgagtagctgggattacaggcgcccccccaccatgccctgctaatttttgtatttttagaagagacaggtttctccatcttggtcaggctggtcttgaactcctgacctcatgatccacccacctcggcctcccaaagtgctgggattacaggtgtcagacaccgcgcctggcctgatagctttactaaggaaaaaaatgaacactgtatataaatagtgttgtgtaaaacactattttacatagttccaatagccgttgcaagaaaaaaagtttaactagcttattgaatattttgaaatcactcagcattttatatttatatttacaaacagccccttaaaccacatcaaacaacaaactgatcttttgaactcgtgtttctttagtttgaattaataaatttgattaacataaagacacaaacatattgcatagattattattaaactttttaggaccgtaataatttcacataacatttttttaggaaaaaaaattccaaaacaaacacgctagatctaacaacagtatttaattaaagtaaaattaggctaatgagataaattggccctctctccactatcctcttaccatattattggtttaaacattaagaacttcctaaattaaaacagaagctgaatatttttctgtgacttttcagacttgaatgcccagatttgagtacatatggaggtcctggaaccaatctctagcatataccatgggacacctgtggtaccaacccttaatgagatgcattccaagtgtgttcattgtttctgacttggctttatgaagagcttgttttgcaggcataaatagaaaatactacaaatataactcataaaattgccactcaaattatgtcacatgcttacctctgaaaaccagtatcaagaaaattatgaaacagaatcaagtgaaaaaagacttcttcccctgcattaactgttcacttattttcacgagaatctgtgattctgtagaaagcttgaggcagtatttctaaaaccaaaacaaggagaaatatgaaaataaatatttggataatttacatcctaaaggagaaaaactgtacactgattcattcattgagtggatattaattcactcatattagaacacactctggattattcatttcactttgttctatgttaggaaatccatttactcaatccttcagaatacccaaatatgaatatcttcctaatcagttttaaagaccactatagcatcagtggactgtgtgttttctggatccaaattcataggtagattctatggaagatataatagagttataaaaagtgatccctgtcctcaaactaagactaacccacattgatctaacacacacttggatgatatatgatgtcatatctcatttagtgctcaacaatgtggtttagaccctatataaaaagagtacagtaaataactagctttaagattgctgatggcagtgaaaagcctggatacttttattcaaattcatgagtgtttaagttcaatcatatctgttgctatcaaataaagtaattaatcactaaagtaggtctacatggcataaaatgcagtaggatgttgaaaatttaagttaaaatcaaggcagggcagatcactgactcattaacttgtggactgccttgatcatgaccatcttgattaaaagcatttatcaactgcccacttgctgtgcacacgtacatactaggaatcctcactgtgttctaaaagggtcattgtattagtgagtgtttgctggttccaagcaacaattaccaactggttaggaggttttcaaagccaagaggccccattttgtggatgctgtggaacacacctaacaactggccccctgccccgaccccaccaccatggatgctcagaaagaacactagaagtgagtcacaggatctttccaacactgagggattccaatccttgatctgcctgtccattgcagtgactattttgtaaaaggaagctcctaacttggtactgcctatgtacaacagtttgtctcaggacagttcctgtttacatctattttctcagcgtattgctaacagcactcacttttactctcaaagtttagaaaataaattgacactttacctgcaccctagatcggacaacctggttgaaatgcacttcatgggttgccttgcaggagaaattttatcattgaattatcacaacatccttccagaacaaatatcccaaacaggaaaacttttctgtatctggtaaaattaaccttttttccccttatttatctatggtgacccataatagctttcatcttctattttatcagtcaaccaattatggaaatttatagcaattaaggacatatgtgtctgagtttgtgtgaggctgaactgggtagattttaaggtttataaattttagatatatcttcatgaaaatgaatgtagcatggctatgcctgctttaagtagacaaagagcatagcagaaggatgtgaatagatggcaaaactgatggaataatggagaacttggctttaaaaactcttatttattggttattcctattgattcttccagcaggagacaatcataggtctatttaggtcactgttgctgaaatcaatgatcaccaactatctttccattcttgtattacttctcacaagattcagaacccaaacgagagaaaccaaaaattttcccttgatttgtatccctaccctgtgcctataaaaagacatggggtcttatcttaccatctcattaagcccttgcccaatggatgagaggtaattgaaaacttaaaaagaaatagaattaactcccgtgtgtcaagtctttctcaaagtcactaaaaataatataatccatctttagatgtggaaaactgctggatatataatatcctctttttcttccattttttcaagaatattttgattcctaaagtatcttaaagcttgctgtggtggtacgtgcgcataaaagcagtaattagtaagaaccagaaatatttgtcacattgcggaagagtgtaatctaaacagaataacgatgataacaaaataatgtacatgtacgataggtactacattggatggccagggctgctgtagcaaagtagcacagacggtggtttaaacaacagaaaagtattaccttgtaattctagaggctagaattccaaaatcaaggtgtgagcagggacggtaccttctgagggctggatctgtttcaggcctctttatttgacttgtagatggcatcctctctctgtctctctcatcttccctgtacgtatttctgtttctgactaaatttcccctttttgaaggacaccaatcatactggaattcagacctacccaaatcacctcatttcaacttgtgcctataaagacccctagctctaaataaggtcacattctgaggtactggggttaggattccaacatgtcttctttgagagacacaatacaacccataacaagttcttaaattatggccaaatgaaagtgatccataaaaatgaaatgattaccaccagtatatttgagattaagagatgaattgctaatctatctttcttatattacatgactaatatggagaaagaaattgtttaaatataaccaaggcatcgtccgttattctcaatggagatgcttgaaatatattgtattctcatagtcttcttgtaccttcactaacacttttcttaaacatatattgtatgaaaataagaataaagaaattactgacattgtaaatttaatgaaaatctaataagaaaatgtaggaataatgaattgggaaaggaataatacaaaagcaaaaaaaaaaaaaaggtactgtaataaagctagtggagtctttctgttctctggtttttaggacctagaaactagctatgtgccaggaagaaatctatgaacaaaaccagtatagacttttctgagctaaaatgagaagttagatgaggaaatttgcgttgagcactacttatcatttaagcaccattgagcaataagcagcatggatttacacggaacaaatcatgccaaacaaatctgattgctttttttttttattgaattacaagattagtggatgaatgcaatgtgagagatgtaatacatttggattttagcaaaaacatttgatacagcatctcatgcactctaaaacgaattcaaatagtcaggaatgttaacagcaaggtaaggaagggaaattaaatgaaggattgcaaagaaaaagaagtgataatcaaccgtgatatggcagcttgggaacacatcattataaggtactatagtgatcacagggtttattcagtacctattaacattcacactgctttcttgggcttgataagaagaaacggaataaaggacttagaatgcaccccatgactacagacaatatatacaatcaatccagatttagagaaagaagaaaatagattttgcctcaaagatttttgctgctgttgaaagttacttatattactaactcatttattcacttcatgccctaaaattcggtcgtggatgcctttatttggcttttcttgtgtcttaggacaagccaattttttcagtcatccaatcttcctggtctaatactaaggatccatggaaaagatgtcagaggcactcttggtttcttgactttttagtgatgaggatacttggattccaccagagtctgtggatgctttatgtaagatactgccctcaaggtgaaagttaaatatgataattaaataaggagaaggcagtagaaatattctaaccaaattcacagttgatacaaggtgctactagaagcagtgaggccagtaaaatt

SEQ ID NO: 297 - DNA, 4055 bp, Homo sapiens
accccctgcttggttgcaccctcagatagtacccatgagcttcactgttcagcctcggggcccaggcgcttcctggaatctctccttggccggggttaaaatgcagttcccgctcaaaatgcctctaggttgatagaagtccagatcctgaggaaatctccagctaaatgctcaaaatataaaaactgagctgagatttgcgaagagcagcagcatggatggattttatgaccagcaagtgccttacatggtcaccaatagtcagcgtgggagaaattgtaacgagaaaccaacaaatgtcaggaaaagaaaattcattaacagagatctggctcatgattcagaagaactctttcaagatctaagtcaattacaggaaacatggcttgcagaagtggcttttcatggcctgccactgaaaatcaagaaagaaccccacagtccatgttcagaaatcagctctgcctgcagtcaagaacagccctttaaattcagctatggagaaaagtgcctgtacaatgtcagtgcctatgatcagaagccacaagtgggaatgaggccctccaacccccccacaccatccagcacgccagtgtccccactgcatcatgcatctccaaactcaactcatacaccgaaacctgaccgggccttcccagctcacctccctccatcgcagtccataccagatagcagctaccccatggaccacagatttcgccgccagctttctgaaccctgtaactcctttcctcctttgccgacgatgccaagggaaggacgtcctatgtaccaacgccagatgtctgagccaaacatccccttcccaccacaaggctttaagcaggagtaccacgacccagtgtatgaacacaacaccatggttggcagtgcggccagccaaagctttccccctcctctgatgattaaacaggaacccagagattttgcatatgactcagaagtgcctagctgccactccatttatatgaggcaagaaggcttcctggctcatcccagcagaacagaagctgtatgtttgaaaagggccccaggcagttttatgatgacacctgtgttgtcccagaaaaattcgatggagacatcaaacaagagccaggaatgtatcgggaaggacccacataccaacggcgaggatcacttcagctctggcagtttttggtagctcttctggatgacccttcaaattctcattttattgcctggactggtcgaggcatggaatttaaactgattgagcctgaagaggtggcccgacgttggggcattcagaaaaacaggccagctatgaactatgataaacttagccgttcactccgctattactatgagaaaggaattatgcaaaaggtggctggagagagatatgtctacaagtttgtgtgtgatccagaagcccttttctccatggcctttccagataatcagcgtccactgctgaagacagacatggaacgtcacatcaacgaggaggacacagtgcctctttctcactttgatgagagcatggcctacatgccggaagggggctgctgcaacccccacccctacaacgaaggctacgtgtattaacacaagtgacagtcaagcagggcgtttttgcgcttttccttttttctgcaagatacagagaattgctgaatctttgttttatttctgttgtttgtattttatttttaaataataatacacaaaaaggggcttttcctgttgcattattctatggtctgccatggactgtgcactttatttgagggtgggtgggagtaatctaaacatttattctgtgtaacaggaagctaatgggtgaatgggcagagggatttggggattactttttacttaggcttgggatggggtcctacaagttttgagtatgatgaaactatatcatgtctgtttgatttcataacaacataagataatgtttattttatcggggtatctatggtacagttaatttcacgttgtgtaaatatccacttggagactatttgccttgggcattttcccctgtcatttatgagtctctgcaggtgtacaaaaaaaccccaatctactgtaaatggcagtttaattgttagaaatgactgtttttgcaccacttgtaaaaaggtatttagcgattgcatttgctgtttgttgttttattttgctttatatatgacttgcagaggataaccataaaatgggtaattctctctgaagttgaataatcaccatgactgtaaatgaggggcacaattttggactctggcgccaaactgagtcataggccagtagcattacgtgtatctggtgccaccttgctgtttagatacaaatcataccgtcttttaaatattttgaagcccatttcagttaaataatgacatgtcatggtcctttggaatcttcatttaaatgttaaatctggaatcaaaatgaagcaaaaaatatctgtctccttttcactttcttcagtacataaatacattatttaatcaataagaattaactgtactaaatcatgtattatgctgttctagttacagcaaacactctttaagaaaaatatccaatacactaaataggtactatagtaatttttagacatggtacccattgatatgcatttaaaccttttactgctgtgttatgttgataacatatataaatattagataatgctaatgcttctgctgctgtcttttctgtaatattctctttcatgctgaatttactatgaccatttataagcagtgcagttaactacagatagcatttcaggacaaaatagatgactcaaaccatttattgcttaaaaaatagcttacgccatgctatgctataagcagcttttatgcacattgacaaatgaagagtaagcttcagcttgctaaaggaaactgtggaaccttttgtaacttttggtgatatggaaaattatttacaaaccgtcaaagaatatgaggaagttgctgtatgacatagtgctggcactgatattatccatcatctctttttggacacttctgtaaatgtgattggattgtttgaaagaagatttaaagtttcaaagttttttgttctgtttttgctttgcatttggagaaaatattgaaagcagggtatgttgtttcattcaccttgaaaaaaccatgagtaaatggggatatagaatctctgaatagctcgctaaaagattcaagcaagggacatgaattttgttccatctatcaataatatccagaagaacaacttttttaaagagtctatagcaaaaagcaaaaaaaaaaaaaaattctaaacacaaagtcaaaataaacctattgtaaaagcatttcgtgatgagcatgaaaaagattgtttaaagatgatccccccagctacccattttccaaaactacacagatcacagctcatttctctaagtggagcagttatcaagaaacccaaacaccaaaattgctactcttcacatttaatcctacaaaaagtactccaatttcaaaatatgtatgtaacctgcgatttcaatgattgttgttcatatacatcatgtattattttggcccattttgggcctaaaaaagaaaactatgccttaaaaatcagaaccttttctccccactatgcttatgtggccatctacagcacttagaataaaaacagatgttaaaatattcagtgaaagttttattggaaaaaggaattgagatatataattgagatttggtgaaattgaaggagaaaatttaagtgagtctttaaaatatattctgaatgaaaactgtattgaggattcatttttgttccttttttttctttttctcttttctcctttttcttctttttaatagtctagttttagtcagtcagtgaggaagaattgggccatgctaacgttatcacaagagaacaatggcagaaatggtattagttatataatatttaaggacaaactatatgttttgctgttttaacgtagtgactcactgaactaaatacataattgaccaacattaagtgtatttccaatacagaagggttga

SEQ ID NO: 298 - protein, 308 aa, Homo sapiens
MVTNSQRGRNCNEKPTNVRKRKFINRDLAHDSEELFQDLSQLQETWLAEVAFHGLPLKIKKEPHSPCSEISSACSQEQPFKFSYGEKCLYNVSAYDQKPQVGMRPSNPPTPSSTPVSPLHHDNSTHTPKPDRAFPAHLPPSQSIPDSSYPMDHRFRRQLSEPCNSFPPLPTMPREGRPMYQRQMSEPNIPFPPQGFKQEYHDPVYEHNTMVGSAASQSFPPPLMIKQEPRDFAYDSEVPSCHSIYMRQEGFLAHPSRTEAVCLKRAPGSFMMTPVLSQKNSMSNKSQECIGKDPHTNGEDHFSSGSFW

SEQ ID NO: 299 - DNA, 3790 bp, Homo sapiens
gttcatcaggacgggatgcttcaagatttaagtgcaagtgtcttctttcctccttgttcacaacacagaacgttagctcaggtacctgacaatgatgagcagtttgtaccagactatcaggctgaaagtttggcttttcatggcctgccactgaaaatcaagaaagaaccccacagtccatgttcagaaatcagctctgcctgcagtcaagaacagccctttaaattcagctatggagaaaagtgcctgtacaatgtcagtgcctatgatcagaagccacaagtgggaatgaggccctccaacccccccacaccatccagcacgccagtgtccccactgcatcatgcatctccaaactcaactcatacaccgaaacctgaccgggccttcccagctcacctccctccatcgcagtccataccagatagcagctaccccatggaccacagatttcgccgccagctttctgaaccctgtaactcctttcctcctttgccgacgatgccaagggaaggacgtcctatgtaccaacgccagatgtctgagccaaacatccccttcccaccacaaggctttaagcaggagtaccacgacccagtgtatgaacacaacaccatggttggcagtgcggccagccaaagctttccccctcctctgatgattaaacaggaacccagagattttgcatatgactcagaagtgcctagctgccactccatttatatgaggcaagaaggcttcctggctcatcccagcagaacagaagctgtatgtttgaaaagggccccaggcagttttatgatgacacctgtgttgtcccagaaaaattcgatggagacatcaaacaagagccaggaatgtatcgggaaggacccacataccaacggcgaggatcacttcagctctggcagtttttggtagctcttctggatgacccttcaaattctcattttattgcctggactggtcgaggcatggaatttaaactgattgagcctgaagaggtggcccgacgttggggcattcagaaaaacaggccagctatgaactatgataaacttagccgttcactccgctattactatgagaaaggaattatgcaaaaggtggctggagagagatatgtctacaagtttgtgtgtgatccagaagcccttttctccatggcctttccagataatcagcgtccactgctgaagacagacatggaacgtcacatcaacgaggaggacacagtgcctctttctcactttgatgagagcatggcctacatgccggaagggggctgctgcaacccccacccctacaacgaaggctacgtgtattaacacaagtgacagtcaagcagggcgtttttgcgcttttccttttttctgcaagatacagagaattgctgaatctttgttttatttctgttgtttgtattttatttttaaataataatacacaaaaaggggcttttcctgttgcattattctatggtctgccatggactgtgcactttatttgagggtgggtgggagtaatctaaacatttattctgtgtaacaggaagctaatgggtgaatgggcagagggatttggggattactttttacttaggcttgggatggggtcctacaagttttgagtatgatgaaactatatcatgtctgtttgatttcataacaacataagataatgtttattttatcggggtatctatggtacagttaatttcacgttgtgtaaatatccacttggagactatttgccttgggcattttcccctgtcatttatgagtctctgcaggtgtacaaaaaaaccccaatctactgtaaatggcagtttaattgttagaaatgactgtttttgcaccacttgtaaaaaggtatttagcgattgcatttgctgtttgttgttttattttgctttatatatgacttgcagaggataaccataaaatgggtaattctctctgaagttgaataatcaccatgactgtaaatgaggggcacaattttggactctggcgccaaactgagtcataggccagtagcattacgtgtatctggtgccaccttgctgtttagatacaaatcataccgtcttttaaatattttgaagcccatttcagttaaataatgacatgtcatggtcctttggaatcttcatttaaatgttaaatctggaatcaaaatgaagcaaaaaatatctgtctccttttcactttcttcagtacataaatacattatttaatcaataagaattaactgtactaaatcatgtattatgctgttctagttacagcaaacactctttaagaaaaatatccaatacactaaataggtactatagtaatttttagacatggtacccattgatatgcatttaaaccttttactgctgtgttatgttgataacatatataaatattagataatgctaatgcttctgctgctgtcttttctgtaatattctctttcatgctgaatttactatgaccatttataagcagtgcagttaactacagatagcatttcaggacaaaatagatgactcaaaccatttattgcttaaaaaatagcttacgccatgctatgctataagcagcttttatgcacattgacaaatgaagagtaagcttcagcttgctaaaggaaactgtggaaccttttgtaacttttggtgatatggaaaattatttacaaaccgtcaaagaatatgaggaagttgctgtatgacatagtgctggcactgatattatccatcatctctttttggacacttctgtaaatgtgattggattgtttgaaagaagatttaaagtttcaaagttttttgttctgtttttgctttgcatttggagaaaatattgaaagcagggtatgttgtttcattcaccttgaaaaaaccatgagtaaatggggatatagaatctctgaatagctcgctaaaagattcaagcaagggacatgaattttgttccatctatcaataatatccagaagaacaacttttttaaagagtctatagcaaaaagcaaaaaaaaaaaaaaattctaaacacaaagtcaaaataaacctattgtaaaagcatttcgtgatgagcatgaaaaagattgtttaaagatgatccccccagctacccattttccaaaactacacagatcacagctcatttctctaagtggagcagttatcaagaaacccaaacaccaaaattgctactcttcacatttaatcctacaaaaagtactccaatttcaaaatatgtatgtaacctgcgatttcaatgattgttgttcatatacatcatgtattattttggcccattttgggcctaaaaaagaaaactatgccttaaaaatcagaaccttttctccccactatgcttatgtggccatctacagcacttagaataaaaacagatgttaaaatattcagtgaaagttttattggaaaaaggaattgagatatataattgagatttggtgaaattgaaggagaaaatttaagtgagtctttaaaatatattctgaatgaaaactgtattgaggattcatttttgttccttttttttctttttctcttttctcctttttcttctttttaatagtctagttttagtcagtcagtgaggaagaattgggccatgctaacgttatcacaagagaacaatggcagaaatggtattagttatataatatttaaggacaaactatatgttttgctgttttaacgtagtgactcactgaactaaatacataattgaccaacattaagtgtatttccaatacagaagggttga

SEQ ID NO: 300 - protein, 297 aa, Homo sapiens
MLQDLSASVFFPPCSQHRTLAQVPDNDEQFVPDYQAESLAFHGLPLKIKKEPHSPCSEISSACSQEQPFKFSYGEKCLYNVSAYDQKPQVGMRPSNPPTPSSTPVSPLHHDNSTHTPKPDRAFPAHLPPSQSIPDSSYPMDHRFRRQLSEPCNSFPPLPTMPREGRPMYQRQMSEPNIPFPPQGFKQEYHDPVYEHNTMVGSAASQSFPPPLMIKQEPRDFAYDSEVPSCHSIYMRQEGFLAHPSRTEAVCLKRAPGSFMMTPVLSQKNSMSNKSQECIGKDPHTNGEDHFSSGSFW

SEQ ID NO: 301 - DNA, 4121 bp, Homo sapiens
agaagtagaggaaaaaccaccgaattgagctctgtcagaggcgctttcggcttccaagggggaagtgctgggctataattaatgtttttattaaatttggagggaagtttttgcagcctttcgcctagcgtggccttcaggttgatagaagtccagatcctgaggaaatctccagctaaatgctcaaaatataaaaactgagctgagatttgcgaagagcagcagcatggatggattttatgaccagcaagtgccttacatggtcaccaatagtcagcgtgggagaaattgtaacgagaaaccaacaaatgtcaggaaaagaaaattcattaacagagatctggctcatgattcagaagaactctttcaagatctaagtcaattacaggaaacatggcttgcagaagctcaggtacctgacaatgatgagcagtttgtaccagactatcaggctgaaagtttggcttttcatggcctgccactgaaaatcaagaaagaaccccacagtccatgttcagaaatcagctctgcctgcagtcaagaacagccctttaaattcagctatggagaaaagtgcctgtacaatgtcagtgcctatgatcagaagccacaagtgggaatgaggccctccaacccccccacaccatccagcacgccagtgtccccactgcatcatgcatctccaaactcaactcatacaccgaaacctgaccgggccttcccagctcacctccctccatcgcagtccataccagatagcagctaccccatggaccacagatttcgccgccagctttctgaaccctgtaactcctttcctcctttgccgacgatgccaagggaaggacgtcctatgtaccaacgccagatgtctgagccaaacatccccttcccaccacaaggctttaagcaggagtaccacgacccagtgtatgaacacaacaccatggttggcagtgcggccagccaaagctttccccctcctctgatgattaaacaggaacccagagattttgcatatgactcagaagtgcctagctgccactccatttatatgaggcaagaaggcttcctggctcatcccagcagaacagaagctgtatgtttgaaaagggccccaggcagttttatgatgacacctgtgttgtcccagaaaaattcgatggagacatcaaacaagagccaggaatgtatcgggaaggacccacataccaacggcgaggatcacttcagctctggcagtttttggtagctcttctggatgacccttcaaattctcattttattgcctggactggtcgaggcatggaatttaaactgattgagcctgaagaggtggcccgacgttggggcattcagaaaaacaggccagctatgaactatgataaacttagccgttcactccgctattactatgagaaaggaattatgcaaaaggtggctggagagagatatgtctacaagtttgtgtgtgatccagaagcccttttctccatggcctttccagataatcagcgtccactgctgaagacagacatggaacgtcacatcaacgaggaggacacagtgcctctttctcactttgatgagagcatggcctacatgccggaagggggctgctgcaacccccacccctacaacgaaggctacgtgtattaacacaagtgacagtcaagcagggcgtttttgcgcttttccttttttctgcaagatacagagaattgctgaatctttgttttatttctgttgtttgtattttatttttaaataataatacacaaaaaggggcttttcctgttgcattattctatggtctgccatggactgtgcactttatttgagggtgggtgggagtaatctaaacatttattctgtgtaacaggaagctaatgggtgaatgggcagagggatttggggattactttttacttaggcttgggatggggtcctacaagttttgagtatgatgaaactatatcatgtctgtttgatttcataacaacataagataatgtttattttatcggggtatctatggtacagttaatttcacgttgtgtaaatatccacttggagactatttgccttgggcattttcccctgtcatttatgagtctctgcaggtgtacaaaaaaaccccaatctactgtaaatggcagtttaattgttagaaatgactgtttttgcaccacttgtaaaaaggtatttagcgattgcatttgctgtttgttgttttattttgctttatatatgacttgcagaggataaccataaaatgggtaattctctctgaagttgaataatcaccatgactgtaaatgaggggcacaattttggactctggcgccaaactgagtcataggccagtagcattacgtgtatctggtgccaccttgctgtttagatacaaatcataccgtcttttaaatattttgaagcccatttcagttaaataatgacatgtcatggtcctttggaatcttcatttaaatgttaaatctggaatcaaaatgaagcaaaaaatatctgtctccttttcactttcttcagtacataaatacattatttaatcaataagaattaactgtactaaatcatgtattatgctgttctagttacagcaaacactctttaagaaaaatatccaatacactaaataggtactatagtaatttttagacatggtacccattgatatgcatttaaaccttttactgctgtgttatgttgataacatatataaatattagataatgctaatgcttctgctgctgtcttttctgtaatattctctttcatgctgaatttactatgaccatttataagcagtgcagttaactacagatagcatttcaggacaaaatagatgactcaaaccatttattgcttaaaaaatagcttacgccatgctatgctataagcagcttttatgcacattgacaaatgaagagtaagcttcagcttgctaaaggaaactgtggaaccttttgtaacttttggtgatatggaaaattatttacaaaccgtcaaagaatatgaggaagttgctgtatgacatagtgctggcactgatattatccatcatctctttttggacacttctgtaaatgtgattggattgtttgaaagaagatttaaagtttcaaagttttttgttctgtttttgctttgcatttggagaaaatattgaaagcagggtatgttgtttcattcaccttgaaaaaaccatgagtaaatggggatatagaatctctgaatagctcgctaaaagattcaagcaagggacatgaattttgttccatctatcaataatatccagaagaacaacttttttaaagagtctatagcaaaaagcaaaaaaaaaaaaaaattctaaacacaaagtcaaaataaacctattgtaaaagcatttcgtgatgagcatgaaaaagattgtttaaagatgatccccccagctacccattttccaaaactacacagatcacagctcatttctctaagtggagcagttatcaagaaacccaaacaccaaaattgctactcttcacatttaatcctacaaaaagtactccaatttcaaaatatgtatgtaacctgcgatttcaatgattgttgttcatatacatcatgtattattttggcccattttgggcctaaaaaagaaaactatgccttaaaaatcagaaccttttctccccactatgcttatgtggccatctacagcacttagaataaaaacagatgttaaaatattcagtgaaagttttattggaaaaaggaattgagatatataattgagatttggtgaaattgaaggagaaaatttaagtgagtctttaaaatatattctgaatgaaaactgtattgaggattcatttttgttccttttttttctttttctcttttctcctttttcttctttttaatagtctagttttagtcagtcagtgaggaagaattgggccatgctaacgttatcacaagagaacaatggcagaaatggtattagttatataatatttaaggacaaactatatgttttgctgttttaacgtagtgactcactgaactaaatacataattgaccaacattaagtgtatttccaatacagaagggttga

SEQ ID NO: 302 - protein, 337 aa, Homo sapiens
MDGFYDQQVPYMVTNSQRGRNCNEKPTNVRKRKFINRDLAHDSEELFQDLSQLQETWLAEAQVPDNDEQFVPDYQAESLAFHGLPLKIKKEPHSPCSEISSACSQEQPFKFSYGEKCLYNVSAYDQKPQVGMRPSNPPTPSSTPVSPLHHDNSTHTPKPDRAFPAHLPPSQSIPDSSYPMDHRFRRQLSEPCNSFPPLPTMPREGRPMYQRQMSEPNIPFPPQGFKQEYHDPVYEHNTMVGSAASQSFPPPLMIKQEPRDFAYDSEVPSCHSIYMRQEGFLAHPSRTEAVCLKRAPGSFMMTPVLSQKNSMSNKSQECIGKDPHTNGEDHFSSGSFW

SEQ ID NO: 303 - DNA, 3935 bp, Homo sapiens
aagccatcttgttcccctctaggttgatagaagtccagatcctgaggaaatctccagctaaatgctcaaaatataaaaactgagctgagatttgcgaagagcagcagcatggatggattttatgaccagcaagtgccttacatggtcaccaatagtcagcgtgggagaaattgtaacgagaaaccaacaaatgtcaggaaaagaaaattcattaacagagatctggctcatgattcagaagaactctttcaagatctaagtcaattacaggaaacatggcttgcagaagctcaggtacctgacaatgatgagcagtttgtaccagactatcaggctgaaagtttggcttttcatggcctgccactgaaaatcaagaaagaaccccacagtccatgttcagaaatcagctctgcctgcagtcaagaacagccctttaaattcagctatggagaaaagtgcctgtacaatgtcagtgcctatgatcagaagccacaagtgggaatgaggccctccaacccccccacaccatccagcacgccagtgtccccactgcatcatgcatctccaaactcaactcatacaccgaaacctgaccgggccttcccagctcacctccctccatcgcagtccataccagatagcagctaccccatggaccacagatttcgccgccagctttctgaaccctgtaactcctttcctcctttgccgacgatgccaagggaaggacgtcctatgtaccaacgccagatgtctgagccaaacatccccttcccaccacaaggctttaagcaggagtaccacgacccagtgtatgaacacaacaccatggttggcagtgcggccagccaaagctttccccctcctctgatgattaaacaggaacccagagattttgcatatgactcaggctgtatgtttgaaaagggccccaggcagttttatgatgacacctgtgttgtcccagaaaaattcgatggagacatcaaacaagagccaggaatgtatcgggaaggacccacataccaacggcgaggatcacttcagctctggcagtttttggtagctcttctggatgacccttcaaattctcattttattgcctggactggtcgaggcatggaatttaaactgattgagcctgaagaggtggcccgacgttggggcattcagaaaaacaggccagctatgaactatgataaacttagccgttcactccgctattactatgagaaaggaattatgcaaaaggtggctggagagagatatgtctacaagtttgtgtgtgatccagaagcccttttctccatggcctttccagataatcagcgtccactgctgaagacagacatggaacgtcacatcaacgaggaggacacagtgcctctttctcactttgatgagagcatggcctacatgccggaagggggctgctgcaacccccacccctacaacgaaggctacgtgtattaacacaagtgacagtcaagcagggcgtttttgcgcttttccttttttctgcaagatacagagaattgctgaatctttgttttatttctgttgtttgtattttatttttaaataataatacacaaaaaggggcttttcctgttgcattattctatggtctgccatggactgtgcactttatttgagggtgggtgggagtaatctaaacatttattctgtgtaacaggaagctaatgggtgaatgggcagagggatttggggattactttttacttaggcttgggatggggtcctacaagttttgagtatgatgaaactatatcatgtctgtttgatttcataacaacataagataatgtttattttatcggggtatctatggtacagttaatttcacgttgtgtaaatatccacttggagactatttgccttgggcattttcccctgtcatttatgagtctctgcaggtgtacaaaaaaaccccaatctactgtaaatggcagtttaattgttagaaatgactgtttttgcaccacttgtaaaaaggtatttagcgattgcatttgctgtttgttgttttattttgctttatatatgacttgcagaggataaccataaaatgggtaattctctctgaagttgaataatcaccatgactgtaaatgaggggcacaattttggactctggcgccaaactgagtcataggccagtagcattacgtgtatctggtgccaccttgctgtttagatacaaatcataccgtcttttaaatattttgaagcccatttcagttaaataatgacatgtcatggtcctttggaatcttcatttaaatgttaaatctggaatcaaaatgaagcaaaaaatatctgtctccttttcactttcttcagtacataaatacattatttaatcaataagaattaactgtactaaatcatgtattatgctgttctagttacagcaaacactctttaagaaaaatatccaatacactaaataggtactatagtaatttttagacatggtacccattgatatgcatttaaaccttttactgctgtgttatgttgataacatatataaatattagataatgctaatgcttctgctgctgtcttttctgtaatattctctttcatgctgaatttactatgaccatttataagcagtgcagttaactacagatagcatttcaggacaaaatagatgactcaaaccatttattgcttaaaaaatagcttacgccatgctatgctataagcagcttttatgcacattgacaaatgaagagtaagcttcagcttgctaaaggaaactgtggaaccttttgtaacttttggtgatatggaaaattatttacaaaccgtcaaagaatatgaggaagttgctgtatgacatagtgctggcactgatattatccatcatctctttttggacacttctgtaaatgtgattggattgtttgaaagaagatttaaagtttcaaagttttttgttctgtttttgctttgcatttggagaaaatattgaaagcagggtatgttgtttcattcaccttgaaaaaaccatgagtaaatggggatatagaatctctgaatagctcgctaaaagattcaagcaagggacatgaattttgttccatctatcaataatatccagaagaacaacttttttaaagagtctatagcaaaaagcaaaaaaaaaaaaaaattctaaacacaaagtcaaaataaacctattgtaaaagcatttcgtgatgagcatgaaaaagattgtttaaagatgatccccccagctacccattttccaaaactacacagatcacagctcatttctctaagtggagcagttatcaagaaacccaaacaccaaaattgctactcttcacatttaatcctacaaaaagtactccaatttcaaaatatgtatgtaacctgcgatttcaatgattgttgttcatatacatcatgtattattttggcccattttgggcctaaaaaagaaaactatgccttaaaaatcagaaccttttctccccactatgcttatgtggccatctacagcacttagaataaaaacagatgttaaaatattcagtgaaagttttattggaaaaaggaattgagatatataattgagatttggtgaaattgaaggagaaaatttaagtgagtctttaaaatatattctgaatgaaaactgtattgaggattcatttttgttccttttttttctttttctcttttctcctttttcttctttttaatagtctagttttagtcagtcagtgaggaagaattgggccatgctaacgttatcacaagagaacaatggcagaaatggtattagttatataatatttaaggacaaactatatgttttgctgttttaacgtagtgactcactgaactaaatacataattgaccaacattaagtgtatttccaatacagaagggttga

SEQ ID NO: 304 - protein, 450 aa, Homo sapiens
MDGFYDQQVPYMVTNSQRGRNCNEKPTNVRKRKFINRDLAHDSEELFQDLSQLQETWLAEAQVPDNDEQFVPDYQAESLAFHGLPLKIKKEPHSPCSEISSACSQEQPFKFSYGEKCLYNVSAYDQKPQVGMRPSNPPTPSSTPVSPLHHDNSTHTPKPDRAFPAHLPPSQSIPDSSYPMDHRFRRQLSEPCNSFPPLPTMPREGRPMYQRQMSEPNIPFPPQGFKQEYHDPVYEHNTMVGSAASQSFPPPLMIKQEPRDFAYDSGCMFEKGPRQFYDDTCVVPEKFDGDIKQEPGMYREGPTYQRRGSLQLWQFLVLDDPSNSHFIAWTGRGMEFKLIEPEEVARRWGIQKNRPAMNYDKLSRSLRYYYEKGIMQKVAGERYVYKFVCDPEALFSMAFPDNQRPLLKTDMERHINEEDTVPLSHFDESMAYMPEGGCCNPHPYNEGYVY
